(19) United States
(12) Patent Application Publication
(10) Pub. No.: US 2023/0220498 A1
(43) Pub. Date: Jul. 13, 2023

(54) Compositions and Methods for Detecting Respiratory Viruses Including Coronaviruses

(71) Applicant: THE TRUSTEES OF THE UNIVERSITY OF PENNSYLVANIA, Philadelphia, PA (US)

(72) Inventor: Erle S. Robertson, Wynnewood, PA (US)

(21) Appl. No.: 17/928,170

(22) PCT Filed: May 26, 2021
(86) PCT No.: PCT/US2021/034195

§ 371 Date: Nov. 28, 2022

Related U.S. Application Data
(60) Provisional application No. 63/032,048, filed on May 29, 2020.

(51) Int. Cl. C12Q 1/70

(52) U.S. Cl. CPC C12Q 1/701; C12Q 1/689

(57) ABSTRACT

The present invention includes compositions and methods for the detection of all known respiratory agents including Coronaviruses, and the recently discovered Sars-CoV-2, the agent of the CoVID Pandemic. The invention further includes detection of immune signatures of patients infected with a Coronavirus as well as other infectious agents.

### CROSS-REFERENCE TO RELATED APPLICATION

[0001] The present application is entitled to priority under 35 U.S.C. § 119(e) to U.S. Provisional Patent Application No. 63/032,048 filed May 29, 2020, which is hereby incorporated by reference in its entirety herein.

### BACKGROUND OF THE INVENTION

[0002] The ongoing Covid-19 pandemic caused by the novel SARS-CoV-2 virus is one of the deadliest picornaviruses to date and the most infectious of all human coronaviruses. This virus is estimated to be around 15-20 times more contagious than the influenza virus and is responsible for more deaths than SARS and MERS combined. The disease apparently has greater impact on individuals who are older with the mortality rate directly proportional with increase in age. This has been striking in individuals who also have other health complications and co-morbidities including diabetes, cardio-pulmonary diseases, or disease related to other major organ systems. It is also important to note that individuals with compromised immune systems are at greater risk for development of more rapid onset of Covid-19 disease. This provides a strong rationale for protection of patients who are HIV positive with a broad range of malignancies including AIDS defining and on-defining cancers. Patients who have cancers and are HIV positive should therefore be categorized as high risk for rapid onset of Covid-19 disease and increased mortality.

[0003] A need exists for compositions and methods for not only detecting SARS-Cov-2 in patients, but identifying those individuals who are at increased risk of mortality based on their associated coinfections. The present invention addressess this need.

### SUMMARY OF THE INVENTION

[0004] As described herein, the present invention relates to compositions and methods for the detection of all known respiratory agents including Coronaviruses, as well as immune signatures of patients infected with a Coronavirus.

[0005] In one aspect, the invention includes a composition comprising a PathoChip v5, wherein the PathoChip v5 comprises over 60,000 probes specific for a plurality of microbes, and a plurality of probes specific for Coronaviruses.

[0006] In certain embodiments, the Coronavirus probes comprise at least one nucleotide sequence selected from the group consisting of SEQ ID NOs: 1-37. In certain embodiments, the Coronavirus probes consist of the nucleotide sequences set forth in SEQ ID NOs: 1-37.

[0007] In another aspect, the invention includes a composition comprising a PathoChip comprising a plurality of probes specific for a plurality of respiratory pathogens, a plurality of probes specific for Coronaviruses, and a plurality of probes specific for immune markers of innate and adaptive responses to infections, inflammation, immune disorders, metabolism, and toxicological responses.

[0008] In certain embodiments, the plurality of probes specific for immune markers of innate and adaptive responses comprise at least one nucleotide sequence selected from the group consisting of SEQ ID NOs: 38-4,671. In certain embodiments, the plurality of probes specific for immune markers of innate and adaptive responses consist of the nucleotide sequences set forth in SEQ ID NOs: 38-4,671. In certain embodiments, the Coronavirus probes comprise at least one nucleotide sequence selected from the group consisting of SEQ ID NOs: 1-37. In certain embodiments, the Coronavirus probes consist of the nucleotide sequences set forth in SEQ ID NOs: 1-37.

[0009] In another aspect, the invention includes a composition comprising a plurality of nucleic acids, wherein the nucleic acids comprise at least one nucleotide sequence selected from the group consisting of SEQ ID NOs: 1-37.

[0010] In another aspect, the invention includes a composition comprising a plurality of nucleic acids, wherein the nucleic acids consist of the nucleotide sequences set forth in SEQ ID NOs: 1-37.

[0011] In another aspect, the invention includes a composition comprising a plurality of nucleic acids, wherein the nucleic acids comprise at least one nucleotide sequence selected from the group consisting of SEQ ID NOs: 38-4,671.

[0012] In another aspect, the invention includes a composition comprising a plurality of nucleic acids, wherein the nucleic acids consist of the nucleotide sequences set forth in SEQ ID NOs: 38-4,671.

[0013] In certain embodiments, the composition comprises a microarray. In certain embodiments, the microarray comprises a biochip, glass slide, bead, or paper.

[0014] In another aspect, the invention includes a composition comprising an Immunome ChIP, wherein the Immunome ChIP comprises a plurality of probes specific for immune markers of innate and adaptive responses to infections, inflammation, immune disorders, metabolism, and toxicological responses.

[0015] In certain embodiments, the plurality of probes comprise at least one nucleotide sequence selected from the group consisting of SEQ ID NOs: 38-4,671. In certain embodiments, the plurality of probes consist of the nucleotide sequences set forth in SEQ ID NOs: 38-4,671.

[0016] In another aspect, the invention includes a method of detecting a Coronavirus in a sample from a subject. The method comprises hybridizing a detectably-labeled nucleic acid from the sample to a PathoChip v5 array, wherein the PathoChip v5 comprises over 60,000 probes specific for a plurality of microbes, and a plurality of probes specific for Coronaviruses. When the nucleic acid from the sample hybridizes to at least three Coronavirus probes on the PathoChip v5, a Coronavirus is detected in the sample.

[0017] In another aspect, the invention includes a method of identifying a high-risk subject. The method comprises hybridizing a detectably-labeled nucleic acid from a sample from the subject to a PathoChip v5 array, wherein the PathoChip v5 comprises over 60,000 probes specific for a plurality of microbes, and a plurality of probes specific for Coronaviruses. When the nucleic acid from the sample hybridizes to at least three Coronavirus probes on the PathoChip v5 and at least three probes specific for a microbe, the subject is identified as high-risk.

[0018] In another aspect, the invention includes a method of detecting a Coronavirus in a sample from a subject. The method comprises hybridizing a detectably-labeled nucleic acid from the sample to a PathoChip array, wherein the PathoChip comprises a plurality of probes specific for a plurality of respiratory pathogens, a plurality of probes specific for Coronaviruses, and a plurality of probes specific for immune markers of innate and adaptive responses to infections, inflammation, immune disorders, metabolism, and toxicological responses. When the nucleic acid from the sample hybridizes to at least three Coronavirus probes on the PathoChip, a Coronavirus is detected in the sample.

[0019] In another aspect, the invention includes a method of identifying a high-risk subject. The method comprises hybridizing a detectably-labeled nucleic acid from a sample from the subject to a PathoChip array, wherein the PathoChip comprises a plurality of probes specific for a plurality of respiratory pathogens, a plurality of probes specific for Coronaviruses, and a plurality of probes specific for immune markers of innate and adaptive responses to infections, inflammation, immune disorders, metabolism, and toxicological responses. When the nucleic acid from the sample hybridizes to at least three Coronavirus probes on the PathoChip and at least three probes specific for a immune markers of innate and adaptive responses, the subject is identified as high-risk.

[0020] In certain embodiments, the Coronavirus probes comprise at least one nucleotide sequence selected from the group consisting of SEQ ID NOs: 1-37. In certain embodiments, the Coronavirus probes consist of the nucleotide sequences set forth in SEQ ID NOs: 1-37.

[0021] In certain embodiments, when a Coronavirus is detected in the sample from the subject or the subject is identified as high-risk, then the subject is administered a treatment for the Coronavirus.

[0022] In certain embodiments, the plurality of probes specific for immune markers of innate and adaptive responses comprises at least one nucleotide sequence selected from the group consisting of SEQ ID NOs: 38-4,671. In certain embodiments, the plurality of probes specific for immune markers of innate and adaptive responses consists of the nucleotide sequences set forth in SEQ ID NOs: 38-4,671.

[0023] In certain embodiments, the subject is human.

[0024] In certain embodiments, the detectably-labeled nucleic acid is labeled with a fluorophore, radioactive phosphate, biotin, or enzyme. In certain embodiments, the fluorophore is Cy3 or Cy5.

### BRIEF DESCRIPTION OF THE DRAWINGS

[0025] The following detailed description of specific embodiments of the invention will be better understood when read in conjunction with the appended drawings. For the purpose of illustrating the invention, there are shown in the drawings exemplary embodiments. It should be understood, however, that the invention is not limited to the precise arrangements and instrumentalities of the embodiments shown in the drawings.

[0026] FIG. 1 illustrates the PathoChip and it's various versions. Version 5 (v5) is disclosed herein and comprises over 60,000 probes specific for viruses, helminths, protozoa, fungi, and bacteria (Banerjee et al. (2015) Sci Rep. 5:15162,10.1038/srep15162; Baldwin et al. (2014) MBio. 5, e01714-01714. doi: 01710.01128/mBio.01714-01714), in addition to 37 probes specific for Coronaviruses (SEQ ID NOs: 1-37).

[0027] FIG. 2 illustrates selection of Coronavirus (including SARS-CoV-2) probes.

[0028] FIGS. 3A-3B illustrate results of validation of the Coronavirus probes with RNA from a patient sample showing the strong hybridization of SARS-CoV-2 probes with viral genomic RNA to unique, conserved probes with mutations that were commonly seen in some SARS-CoV-2 genomic sequences. It also shows specificity of the probes to regions that were included as genomic sections that should not hybridize to the probes and some that have hybridization to probes demonstrating specificity. Panel B shows a box plot of signals for SARS-CoV-2 probe sets (unique, conserved and mutant probes).

[0029] FIG. 4 illustrates probe ID and signal intensity. The top left panel shows the signal obtained from human genomic nucleic acid with minimal detection of some probes. Specifically with different amounts of SARS-COV-2 RNA the entire probe set are detected with some having great intensities.

[0030] FIG. 5 illustrates nucleotide sequences of the Coronavirus probes selected.

[0031] FIG. 6 illustrates total immunome signatures that can be detected by the Immunome ChIP which includes areas of infections, immune disorders, metabolism, toxicology, and inflammatory response, which covers all know immune markers.

[0032] FIGS. 7A-7E illustrate cytokine chip symbols which are known to be associated with the different immune responses. The blue bars on the left show the responses that are unique or conserved across the 5 different types of immune responses and the total for each grouping shown.

### DETAILED DESCRIPTION

### Definitions

[0033] Unless defined otherwise, all technical and scientific terms used herein have the same meaning as commonly understood by one of ordinary skill in the art to which the invention pertains. Although any methods and materials similar or equivalent to those described herein can be used in the practice for testing of the present invention, exemplary materials and methods are described herein. In describing and claiming the present invention, the following terminology will be used.

[0034] It is also to be understood that the terminology used herein is for the purpose of describing particular embodiments only, and is not intended to be limiting.

[0035] The articles “a”, “an”, and “the” are used herein to refer to one or to more than one (i.e., to at least one) of the grammatical object of the article. By way of example, “an element” means one element or more than one element.

[0036] “About” as used herein when referring to a measurable value such as an amount, a temporal duration, and the like, is meant to encompass variations of 20% or ±10%, more preferably ±5%, even more preferably ±1%, and still more preferably ±0.1% from the specified value, as such variations are appropriate to perform the disclosed methods.

[0037] A “biomarker” or “marker” as used herein generally refers to a nucleic acid molecule, clinical indicator, protein, or other analyte that is associated with a disease. In certain embodiments, a nucleic acid biomarker is indicative of the presence in a sample of a pathogenic organism, including but not limited to, viruses, viroids, bacteria, fungi, helminths, and protozoa. In various embodiments, a marker is differentially present in a biological sample obtained from a subject having or at risk of developing a disease (e.g., an infectious disease) relative to a reference. A marker is differentially present if the mean or median level of the biomarker present in the sample is statistically different from the level present in a reference. A reference level may be, for example, the level present in an environmental sample obtained from a clean or uncontaminated source. A reference level may be, for example, the level present in a sample obtained from a healthy control subject or the level obtained from the subject at an earlier timepoint, i.e., prior to treatment. Common tests for statistical significance include, among others, t-test, ANOVA, Kruskal-Wallis, Wilcoxon, Mann-Whitney and odds ratio. Biomarkers, alone or in combination, provide measures of relative likelihood that a subject belongs to a phenotypic status of interest. The differential presence of a marker of the invention in a subject sample can be useful in characterizing the subject as having or at risk of developing a disease (e.g., an infectious disease), for determining the prognosis of the subject, for evaluating therapeutic efficacy, or for selecting a treatment regimen.

[0038] By “agent” is meant any nucleic acid molecule, small molecule chemical compound, antibody, or polypeptide, or fragments thereof.

[0039] By “alteration” or “change” is meant an increase or decrease. An alteration may be by as little as 1%, 2%, 3%, 4%, 5%, 10%, 20%, 30%, or by 40%, 50%, 60%, or even by as much as 70%, 75%, 80%, 90%, or 100%.

[0040] By “biologic sample” is meant any tissue, cell, fluid, or other material derived from an organism.

[0041] By “capture reagent” is meant a reagent that specifically binds a nucleic acid molecule or polypeptide to select or isolate the nucleic acid molecule or polypeptide.

[0042] “Coronaviruses” as used herein is meant a positive, single-stranded enveloped RNA viruse belonging to the Coronaviridae family, including but not limited to, SARS-CoV-2, SARS-CoV, MERS-CoV, 229E (alpha coronavirus), NL63 (alpha coronavirus), OC43 (beta coronavirus), HKU1 (beta coronavirus), 2019-nCoV, and and other common Coronaviruses associated with the common cold.

[0043] As used herein, the terms “determining”, “assessing”, “assaying”, “measuring” and “detecting” refer to both quantitative and qualitative determinations, and as such, the term “determining” is used interchangeably herein with “assaying,” “measuring,” and the like. Where a quantitative determination is intended, the phrase “determining an amount” of an analyte and the like is used. Where a qualitative and/or quantitative determination is intended, the phrase “determining a level” of an analyte or “detecting” an analyte is used.

[0044] By “detectable moiety” is meant a composition that when linked to a molecule of interest renders the latter detectable, via spectroscopic, photochemical, biochemical, immunochemical, or chemical means. For example, useful labels include radioactive isotopes, magnetic beads, metallic beads, colloidal particles, fluorescent dyes, electron-dense reagents, enzymes (for example, as commonly used in an ELISA), biotin, digoxigenin, or haptens.

[0045] A “disease” is a state of health of an animal wherein the animal cannot maintain homeostasis, and wherein if the disease is not ameliorated then the animal's health continues to deteriorate. In contrast, a “disorder” in an animal is a state of health in which the animal is able to maintain homeostasis, but in which the animal's state of health is less favorable than it would be in the absence of the disorder. Left untreated, a disorder does not necessarily cause a further decrease in the animal's state of health.

[0046] “Effective amount” or “therapeutically effective amount” are used interchangeably herein, and refer to an amount of a compound, formulation, material, or composition, as described herein effective to achieve a particular biological result or provides a therapeutic or prophylactic benefit. Such results may include, but are not limited to, anti-tumor activity as determined by any means suitable in the art.

[0047] “Encoding” refers to the inherent property of specific sequences of nucleotides in a polynucleotide, such as a gene, a cDNA, or an mRNA, to serve as templates for synthesis of other polymers and macromolecules in biological processes having either a defined sequence of nucleotides (i.e., rRNA, tRNA and mRNA) or a defined sequence of amino acids and the biological properties resulting therefrom. Thus, a gene encodes a protein if transcription and translation of mRNA corresponding to that gene produces the protein in a cell or other biological system. Both the coding strand, the nucleotide sequence of which is identical to the mRNA sequence and is usually provided in sequence listings, and the non-coding strand, used as the template for transcription of a gene or cDNA, can be referred to as encoding the protein or other product of that gene or cDNA.

[0048] By “fragment” is meant a portion of a nucleic acid molecule. This portion contains, preferably, at least 10%, 20%, 30%, 40%, 50%, 60%, 70%, 80%, or 90% of the entire length of the reference nucleic acid molecule or polypeptide. A fragment may contain 5, 10, 15, 20, 30, 40, 50, 60, 70, 80, 90, or 100 nucleotides.

[0049] “Homologous” as used herein, refers to the subunit sequence identity between two polymeric molecules, e.g., between two nucleic acid molecules, such as, two DNA molecules or two RNA molecules, or between two polypeptide molecules. When a subunit position in both of the two molecules is occupied by the same monomeric subunit; e.g., if a position in each of two DNA molecules is occupied by adenine, then they are homologous at that position. The homology between two sequences is a direct function of the number of matching or homologous positions; e.g., if half (e.g., five positions in a polymer ten subunits in length) of the positions in two sequences are homologous, the two sequences are 50% homologous; if 90% of the positions (e.g., 9 of 10), are matched or homologous, the two sequences are 90% homologous.

[0050] “Hybridization” means hydrogen bonding, which may be Watson-Crick, Hoogsteen or reversed Hoogsteen hydrogen bonding, between complementary nucleobases. For example, adenine and thymine are complementary nucleotides that pair through the formation of hydrogen bonds.

[0051] “Identity” as used herein refers to the subunit sequence identity between two polymeric molecules particularly between two amino acid molecules, such as, between two polypeptide molecules. When two amino acid sequences have the same residues at the same positions; e.g., if a position in each of two polypeptide molecules is occupied by an Arginine, then they are identical at that position. The identity or extent to which two amino acid sequences have the same residues at the same positions in an alignment is often expressed as a percentage. The identity between two amino acid sequences is a direct function of the number of matching or identical positions; e.g., if half (e.g., five positions in a polymer ten amino acids in length) of the positions in two sequences are identical, the two sequences are 50% identical; if 90% of the positions (e.g., 9 of 10), are matched or identical, the two amino acids sequences are 90% identical.

[0052] As used herein, an “instructional material” includes a publication, a recording, a diagram, or any other medium of expression which can be used to communicate the usefulness of the compositions and methods of the invention. The instructional material of the kit of the invention may, for example, be affixed to a container which contains the nucleic acid, peptide, and/or composition of the invention or be shipped together with a container which contains the nucleic acid, peptide, and/or composition. Alternatively, the instructional material may be shipped separately from the container with the intention that the instructional material and the compound be used cooperatively by the recipient.

[0053] The terms “isolated,” “purified,” or “biologically pure” refer to material that is free to varying degrees from components which normally accompany it as found in its native state. “Isolate” denotes a degree of separation from original source or surroundings. “Purify” denotes a degree of separation that is higher than isolation. A “purified” or “biologically pure” protein is sufficiently free of other materials such that any impurities do not materially affect the biological properties of the protein or cause other adverse consequences. That is, a nucleic acid or peptide of this invention is purified if it is substantially free of cellular material, viral material, or culture medium when produced by recombinant DNA techniques, or chemical precursors or other chemicals when chemically synthesized. Purity and homogeneity are typically determined using analytical chemistry techniques, for example, polyacrylamide gel electrophoresis or high performance liquid chromatography. The term “purified” can denote that a nucleic acid or protein gives rise to essentially one band in an electrophoretic gel. For a protein that can be subjected to modifications, for example, phosphorylation or glycosylation, different modifications may give rise to different isolated proteins, which can be separately purified.

[0054] By “marker profile” is meant a characterization of the signal, level, expression or expression level of two or more markers (e.g., polynucleotides).

[0055] By the term “microbe” is meant any and all organisms classed within the commonly used term “microbiology,” including but not limited to, bacteria, viruses, fungi and parasites.

[0056] By the term “microarray” is meant a collection of nucleic acid probes immobilized on a substrate. As used herein, the term “nucleic acid” refers to deoxyribonucleotides, ribonucleotides, or modified nucleotides, and polymers thereof in single- or double-stranded form. The term encompasses nucleic acids containing known nucleotide analogs or modified backbone residues or linkages, which are synthetic, naturally occurring, and non-naturally occurring. Nucleic acid molecules useful in the methods of the invention include any nucleic acid molecule that specifically binds a target nucleic acid (e.g., a nucleic acid biomarker). Such nucleic acid molecules need not be 100% identical with an endogenous nucleic acid sequence, but will typically exhibit substantial identity. Polynucleotides having “substantial identity” to an endogenous sequence are typically capable of hybridizing with at least one strand of a double-stranded nucleic acid molecule. By “hybridize” is meant pair to form a double-stranded molecule between complementary polynucleotide sequences (e.g., a gene described herein), or portions thereof, under various conditions of stringency. (See, e.g., Wahl, G. M. and S. L. Berger (1987) Methods Enzymol. 152:399; Kimmel, A. R. (1987) Methods Enzymol. 152:507).

[0057] By the term “modulating,” as used herein, is meant mediating a detectable increase or decrease in the level of a response in a subject compared with the level of a response in the subject in the absence of a treatment or compound, and/or compared with the level of a response in an otherwise identical but untreated subject. The term encompasses perturbing and/or affecting a native signal or response thereby mediating a beneficial therapeutic response in a subject, preferably, a human.

[0058] In the context of the present invention, the following abbreviations for the commonly occurring nucleic acid bases are used. “A” refers to adenosine, “C” refers to cytosine, “G” refers to guanosine, “T” refers to thymidine, and “U” refers to uridine.

[0059] “Parenteral” administration of an immunogenic composition includes, e.g., subcutaneous (s.c.), intravenous (i.v.), intramuscular (i.m.), or intrasternal injection, or infusion techniques.

[0060] As used herein, the terms “peptide,” “polypeptide,” and “protein” are used interchangeably, and refer to a compound comprised of amino acid residues covalently linked by peptide bonds. A protein or peptide must contain at least two amino acids, and no limitation is placed on the maximum number of amino acids that can comprise a protein's or peptide's sequence. Polypeptides include any peptide or protein comprising two or more amino acids joined to each other by peptide bonds. As used herein, the term refers to both short chains, which also commonly are referred to in the art as peptides, oligopeptides and oligomers, for example, and to longer chains, which generally are referred to in the art as proteins, of which there are many types. “Polypeptides” include, for example, biologically active fragments, substantially homologous polypeptides, oligopeptides, homodimers, heterodimers, variants of polypeptides, modified polypeptides, derivatives, analogs, fusion proteins, among others. The polypeptides include natural peptides, recombinant peptides, synthetic peptides, or a combination thereof.

[0061] By “reference” is meant a standard of comparison. As is apparent to one skilled in the art, an appropriate reference is where an element is changed in order to determine the effect of the element. In one embodiment, the level of a target nucleic acid molecule present in a sample may be compared to the level of the target nucleic acid molecule present in a clean or uncontaminated sample. For example, the level of a target nucleic acid molecule present in a sample may be compared to the level of the target nucleic acid molecule present in a corresponding healthy cell or tissue or in a diseased cell or tissue (e.g., a cell or tissue derived from a subject having a disease, disorder, or condition).

[0062] As used herein, the term “sample” includes a biologic sample such as any tissue, cell, fluid, or other material derived from an organism.

[0063] By “specifically binds” is meant a compound (e.g., nucleic acid probe or primer) that recognizes and binds a molecule (e.g., a nucleic acid biomarker), but which does not substantially recognize and bind other molecules in a sample, for example, a biological sample.

[0064] By “substantially identical” is meant a polypeptide or nucleic acid molecule exhibiting at least 50% identity to a reference amino acid sequence (for example, any one of the amino acid sequences described herein) or nucleic acid sequence (for example, any one of the nucleic acid sequences described herein). Preferably, such a sequence is at least 60%, more preferably 80% or 85%, and more preferably 90%, 95%, 96%, 97%, 98%, or even 99% or more identical at the amino acid level or nucleic acid to the sequence used for comparison.

[0065] Sequence identity is typically measured using sequence analysis software (for example, Sequence Analysis Software Package of the Genetics Computer Group, University of Wisconsin Biotechnology Center, 1710 University Avenue, Madison, Wis. 53705, BLAST, BESTFIT, GAP, or PILEUP/PRETTYBOX programs). Such software matches identical or similar sequences by assigning degrees of homology to various substitutions, deletions, and/or other modifications. Conservative substitutions typically include substitutions within the following groups: glycine, alanine; valine, isoleucine, leucine; aspartic acid, glutamic acid, asparagine, glutamine; serine, threonine; lysine, arginine; and phenylalanine, tyrosine. In an exemplary approach to determining the degree of identity, a BLAST program may be used, with a probability score between e⁻³ and e⁻¹⁰⁰ indicating a closely related sequence.

[0066] By “subject” is meant a mammal, including, but not limited to, a human or non-human mammal, such as a bovine, equine, canine, ovine, feline, mouse, or monkey. The term “subject” may refer to an animal, which is the object of treatment, observation, or experiment (e.g., a patient).

[0067] By “target nucleic acid molecule” is meant a polynucleotide to be analyzed. Such polynucleotide may be a sense or antisense strand of the target sequence. The term “target nucleic acid molecule” also refers to amplicons of the original target sequence. In various embodiments, the target nucleic acid molecule is one or more nucleic acid biomarkers.

[0068] A “target site” or “target sequence” refers to a genomic nucleic acid sequence that defines a portion of a nucleic acid to which a binding molecule may specifically bind under conditions sufficient for binding to occur.

[0069] The term “therapeutic” as used herein means a treatment and/or prophylaxis. A therapeutic effect is obtained by suppression, remission, or eradication of a disease state.

[0070] As used herein, the terms “treat,” treating,” “treatment,” and the like refer to reducing or ameliorating a disorder and/or symptoms associated therewith. It will be appreciated that, although not precluded, treating a disorder or condition does not require that the disorder, condition or symptoms associated therewith be completely eliminated.

[0071] By the term “tumor tissue sample” is meant any sample from a tumor in a subject including any solid and non-solid tumor in the subject.

[0072] Ranges: throughout this disclosure, various aspects of the invention can be presented in a range format. It should be understood that the description in range format is merely for convenience and brevity and should not be construed as an inflexible limitation on the scope of the invention. Accordingly, the description of a range should be considered to have specifically disclosed all the possible subranges as well as individual numerical values within that range. For example, description of a range such as from 1 to 6 should be considered to have specifically disclosed subranges such as from 1 to 3, from 1 to 4, from 1 to 5, from 2 to 4, from 2 to 6, from 3 to 6 etc., as well as individual numbers within that range, for example, 1, 2, 2.7, 3, 4, 5, 5.3, and 6. This applies regardless of the breadth of the range.

### DESCRIPTION

[0073] The present invention features compositions and methods for detecting a Coronavirus, including SARS-CoV-2, in a subject. Detection of the Coronavirus is made in conjunction with detection of other co-indications or co-morbidities (e.g. bacterial, viral, or parasitic infections or cancer). A subject's immune response to the Cornavirus can also be determined using the methods disclosed herein.

[0074] In one embodiment, a diagnostic test was developed herein for accurately identifying the SARS-CoV-2 coronavirus recently identified as the causative agent of the Covid-19 disease. The system uses the microarray platform of 8 arrays of 60,000 probes for detection of all known viruses and other pathogenic bacteria, fungi and parasites. This covers over 6,000 accessions of microorganisms associated with diseases including all known respiratory pathogens. The technology was modified to include new virus SARS-CoV-2 probes and can detect these organisms in as rapid as 24 hours. At the same time probes were engineered bioinformatically for over 1720 immune markers to cover all innate and adaptive responses to infections, inflammatory, immune disorders, metabolism and toxicological responses. Unique probes were generated that would provide a snapshot of the immune response to SARS-CoV-2 which will allow for stratification of the patients who may be at greater risk for development of disease severity. The test at the same time covers all known respiratory pathogens including other coronaviruses from bats, and other mammals providing accurate and efficient detection of SARS-CoV-2 as well as potential for reflex of other respiratory pathogens and cytokines associated with the Covid-19 disease. Therefore the benefit of the test is in the sensitivity, accuracy by using multiple probes across the genome to avoid negative results if one probe fails in the assay screen. The overall screen can be used for research as well as clinical sample testing for detection of SARS-Cov2 coronavirus with high sensitivity and accuracy.

### Compositions

[0075] In one aspect, the invention includes a composition comprising a PathoChip v5, wherein the PathoChip v5 comprises over 60,000 probes specific for a plurality of microbes, and a plurality of probes specific for Coronaviruses. In certain embodiments, the Coronavirus probes comprise at least one nucleotide sequence selected from the group consisting of SEQ ID NOs: 1-37. In certain embodiments, the Coronavirus probes consist of the nucleotide sequences set forth in SEQ ID NOs: 1-37.

[0076] In another aspect, the invention includes a PathoChip that further comprises a plurality of additional probes specific for immune markers of innate and adaptive responses to infections, inflammation, immune disorders, metabolism, and toxicological responses. This version of the PathoChip is also referred to as the ImmunoChIP. In certain embodiments, the PathoChip (ImmunoChIP) comprises 15,000 probes which specific for all know respiratory pathogens including Coronaviruses, sexually transmitted agents, food borne pathogens and other common transmissible agents. In certain embodiments, the Coronavirus probes comprise at least one nucleotide sequence selected from the group consisting of SEQ ID NOs: 1-37. In certain embodiments, the Coronavirus probes consist of the nucleotide sequences set forth in SEQ ID NOs: 1-37. In certain embodiments, the plurality of additional probes are specific for 1,728 known immune markers, that are in response to biological or physical assaults to humans. In certain embodiments, the plurality of additional probes comprise at least one nucleotide sequence selected from the group consisting of SEQ ID NOs: 38-4,671. In certain embodiments, the plurality of additional probes consist of the nucleotide sequences set forth in SEQ ID NOs: 38-4,671.

[0077] In another aspect, the invention includes a composition comprising a plurality of nucleic acids, wherein the nucleic acids comprise at least one nucleotide sequence selected from the group consisting of SEQ ID NOs: 1-37.

[0078] In another aspect, the invention includes a composition comprising a plurality of nucleic acids, wherein the nucleic acids consist of the nucleotide sequences set forth in SEQ ID NOs: 1-37.

[0079] In another aspect, the invention includes a composition comprising a plurality of nucleic acids, wherein the nucleic acids comprise at least one nucleotide sequence selected from the group consisting of SEQ ID NOs: 38-4,671.

[0080] In another aspect, the invention includes a composition comprising a plurality of nucleic acids, wherein the nucleic acids consist of the nucleotide sequences set forth in SEQ ID NOs: 38-4,671.

[0081] In certain embodiments, the composition comprises a microarray. In certain embodiments, the microarray comprises a biochip, glass slide, bead, or paper.

[0082] In another aspect, the invention includes a composition comprising an Immunome ChIP, wherein the Immunome ChIP comprises a plurality of probes specific for immune markers of innate and adaptive responses to infections, inflammation, immune disorders, metabolism, and toxicological responses. In certain embodiments the plurality of probes comprise at least one nucleotide sequence selected from the group consisting of SEQ ID NOs: 38-4,671. In certain embodiments the plurality of probes consist of the nucleotide sequences set forth in SEQ ID NOs: 38-4,671.

[0083] Also provided are kits comprising the compositions disclosed herein or for practicing the invention methods, as described herein. For example, in some embodiments, the invention includes a kit comprising the PathoChip v5 or Immunome ChIP. Additional reagents that are required or desired in the protocol to be practiced with the kit components may be included with the kit. Additional reagents can include, but are not limited to, supplementary nucleic acids, carriers, and PCR amplification reagents (e.g., nucleotides, buffers, cations, etc.), and the like. The kit components may be present in separate containers, or one or more of the components may be present in the same container, where the containers may be storage containers and/or containers that are employed during the assay for which the kit is designed.

[0084] In addition to the above components, the kit may further include instructions for practicing the methods described herein. The instructions will generally include information about the use of the composition for the detection of Coronaviruses. In certain embodiments, the instructions include information about how to use the kit. In certain embodiments the instructions include information on how to analyze and interpret the data generated from use of the kit. In other embodiments, the instructions include at least one of the following: description of the therapeutic agent; dosage schedule and administration for treatment or prevention of Coronavirus or symptoms thereof; precautions; warnings; indications; counter-indications; overdosage information; adverse reactions; animal pharmacology; clinical studies; and/or references. The instructions may be printed directly on the container (when present), or as a label applied to the container, or as a separate sheet, pamphlet, card, or folder supplied in or with the container.

### Methods

[0085] The present invention also includes methods of detecting Coronaviruses, methods of determining a response (e.g. an immune response) to an infection (e.g. COVID-19 infection), and methods of determining whether a patient is high-risk.

[0086] In one aspect, the invention includes a method of detecting a Coronavirus in a sample from a subject. The method comprises hybridizing a detectably-labeled nucleic acid from the sample to a PathoChip v5 array, wherein the PathoChip v5 comprises over 60,000 probes specific for a plurality of microbes, and a plurality of probes specific for Coronaviruses. When the nucleic acid from the sample hybridizes to at least three Coronavirus probes on the PathoChip v5, a Coronavirus is detected in the sample.

[0087] Coronaviruses that can be detected with the compositions and methods disclosed herein include, but are not limited to, SARS-CoV-2, SARS-CoV, MERS-CoV, 229E (alpha coronavirus), NL63 (alpha coronavirus), OC43 (beta coronavirus), HKU1 (beta coronavirus), and 2019-nCoV.

[0088] In another aspect, the invention includes a method of detecting a Coronavirus in a sample from a subject. The method comprises hybridizing a detectably-labeled nucleic acid from the sample to a PathoChip array, wherein when the nucleic acid from the sample hybridizes to at least three Coronavirus probes on the PathoChip, a Coronavirus is detected in the sample. In certain embodiments, the PathoChip comprises a plurality of probes specific for all respiratory pathogens, including Coronaviruses, and immune markers of innate and adaptive responses to infections, inflammation, immune disorders, metabolism, and toxicological responses. In such embodiments, use of the PathoChip results in simultaneous measurement of the Coronavirus, and the subject's response (e.g. immune response) to the virus. This version of the PathoChip is also referred to as the ImmunoChIP.

[0089] In another aspect, the invention includes a method of identifying a high-risk subject comprising hybridizing a detectably-labeled nucleic acid from a sample from the subject to a PathoChip v5 array, wherein when the nucleic acid from the sample hybridizes to at least three Coronavirus probes on the PathoChip v5 and at least three probes specific for a microbe, the subject is identified as high-risk.

[0090] In another aspect, the invention includes a method of identifying a high-risk subject comprising hybridizing a detectably-labeled nucleic acid from a sample from the subject to a PathoChip array, wherein the PathoChip comprises a plurality of probes specific for a plurality of respiratory pathogens, a plurality of probes specific for Coronaviruses, and a plurality of probes specific for immune markers of innate and adaptive responses to infections, inflammation, immune disorders, metabolism, and toxicological responses. When the nucleic acid from the sample hybridizes to at least three Coronavirus probes on the PathoChip and at least three probes specific for a immune markers of innate and adaptive responses, the subject is identified as high-risk.

[0091] In certain embodiments, the Coronavirus probes comprise at least one nucleotide sequence selected from the group consisting of SEQ ID NOs: 1-37. In certain embodiments, the Coronavirus probes consist of the nucleotide sequences set forth in SEQ ID NOs: 1-37.

[0092] In certain embodiments, the plurality of probes specific for immune markers of innate and adaptive responses comprise at least one nucleotide sequence selected from the group consisting of SEQ ID NOs: 38-4,671. In certain embodiments, the plurality of probes specific for immune markers of innate and adaptive responses consist of the nucleotide sequences set forth in SEQ ID NOs: 38-4,671.

[0093] In certain embodiments, when a Coronavirus is detected in the sample from the subject, the subject is administered a treatment for the Coronavirus.

[0094] The detectably-labeled nucleic acid can be labeled with a fluorophore (e.g Cy3 or Cy5), radioactive phosphate, biotin, or enzyme.

[0095] In certain embodiments, the subject is a human.

### Sample Preparation

[0096] The invention provides a means for analyzing multiple types of nucleic acids present in a sample, including DNA and RNA. In various embodiments, sample preparation involves extracting a mixture of nucleic acid molecules (e.g., DNA and RNA). In other embodiments, sample preparation involves extracting a mixture of nucleic acids from multiple organisms, cell types, infectious agents, or any combination thereof. In one embodiment, sample preparation involves the workflow below.

A. Fragment genomic DNA
B. Convert total RNA to first strand cDNA by random-primed reverse transcriptase
C. Label genomic DNA with biotin or fluorescent dye by chemical or enzymatic incorporation
D. Label cDNA with biotin or fluorescent dye by chemical or enzymatic incorporation
E. Label a mixture of genomic DNA and cDNA in the same chemical or enzymatic reaction
F. Mix C+D and co-hybridize to microarray of probes
G. Hybridize E to microarray of probes
H. Amplify targeted genomic DNA
[0097] 1. Use whole-genome amplification (GE GenomiPhi, Sigma WGA, NuGEN Ovation DNA) to non-specifically amplify genomic DNA
[0098] 2. Use amplified products as input for steps C or E above.
   I. Amplify targeted total RNA
[0099] 1. Use whole-transcriptome amplification (Sigma WTA, Ambion in vitro transcription, NuGEN Ovation RNA) to non-specifically amplify total RNA
[0100] 2. Use amplified products as input.

[0101] The samples are hybridized to the microarray (e.g., PathoChip and ImmunoChIP), and the microarrays are washed at various stringencies. Microarrays are scanned for detection of fluorescence. Background correction and inter-array normalization algorithms are applied. Detection thresholds are applied. The results are analyzed for statistical significance.

### Nucleic Acid Amplification

[0102] Target nucleic acid sequences are optionally amplified before being detected. The term “amplified” defines the process of making multiple copies of the nucleic acid from a single or lower copy number of nucleic acid sequence molecule. The amplification of nucleic acid sequences is carried out in vitro by biochemical processes known to those of skill in the art. Prior to or concurrent with identification, the viral sample may be amplified by a variety of mechanisms, some of which may employ PCR. For example, primers for PCR may be designed to amplify regions of the sequence. For RNA viruses a first reverse transcriptase step may be used to generate double stranded DNA from the single stranded RNA. See, for example, PCR Technology: Principles and Applications for DNA Amplification (Ed. H. A. Erlich, Freeman Press, NY, N.Y., 1992); PCR Protocols: A Guide to Methods and Applications (Eds. Innis, et al., Academic Press, San Diego, Calif., 1990); Mattila et al., Nucleic Acids Res. 19, 4967 (1991); Eckert et al., PCR Methods and Applications 1, 17 (1991); PCR (Eds. McPherson et al., IRL Press, Oxford); and U.S. Pat. Nos. 4,683,202, 4,683,195, 4,800,159 4,965,188, and 5,333,675. The sample may be amplified on the array. See, for example, U.S. Pat. No. 6,300,070 and U.S. Ser. No. 09/513,300.

[0103] Other suitable amplification methods include the ligase chain reaction (LCR) (for example, Wu and Wallace, Genomics 4, 560 (1989), Landegren et al., Science 241, 1077 (1988) and Barringer et al. Gene 89:117 (1990)), transcription amplification (Kwoh et al., Proc. Natl. Acad. Sci. USA 86, 1173 (1989) and WO88/10315), self-sustained sequence replication (Guatelli et al., Proc. Nat. Acad. Sci. USA, 87, 1874 (1990) and WO90/06995), selective amplification of target polynucleotide sequences (U.S. Pat. No. 6,410,276), consensus sequence primed PCR (CP-PCR) (U.S. Pat. No. 4,437,975), arbitrarily primed PCR (AP-PCR) (U.S. Pat. Nos. 5,413,909, 5,861,245) and nucleic acid based sequence amplification (NABSA) (see, U.S. Pat. Nos. 5,409,818, 5,554,517, and 6,063,603). Other amplification methods that may be used are described in, U.S. Pat. Nos. 5,242,794, 5,494,810, 4,988,617 and in U.S. Ser. No. 09/854,317.

[0104] Additional methods of sample preparation and techniques for reducing the complexity of a nucleic acid sample are described in Dong et al., Genome Research 11, 1418 (2001), in U.S. Pat. Nos. 6,361,947, 6,391,592 and U.S. Ser. Nos. 09/916,135, 09/920,491 (US Patent Application Publication 20030096235), Ser. No. 09/910,292 (US Patent Application Publication 20030082543), and Ser. No. 10/013,598.

### Detection of Biomarkers

[0105] The biomarkers of this invention can be detected by any suitable method. The methods described herein can be used individually or in combination for a more accurate detection of the biomarkers. Methods for conducting polynucleotide hybridization assays have been developed in the art. Hybridization assay procedures and conditions will vary depending on the application and are selected in accordance with the general binding methods known including those referred to in: Sambrook and Russell, Molecular Cloning: A Laboratory Manual (3^{rd} Ed. Cold Spring Harbor, N.Y, 2001); Berger and Kimmel Methods in Enzymology, Vol. 152, Guide to Molecular Cloning Techniques (Academic Press, Inc., San Diego, Calif., 1987); Young and Davism, P.N.A.S, 80: 1194 (1983). Methods and apparatus for carrying out repeated and controlled hybridization reactions have been described in U.S. Pat. Nos. 5,871,928, 5,874,219, 6,045,996 and 6,386,749, 6,391,623. A data analysis algorithm (E-predict) for interpreting the hybridization results from an array is publicly available (see Urisman, 2005, Genome Biol 6:R78).

[0106] In one embodiment, the hybridized nucleic acids are detected by visualization of one or more labels attached to, or incorporated within, the sample nucleic acids. The labels may be attached or incorporated by any of a number of means well known to those of skill in the art. In one embodiment, the label is simultaneously incorporated during the amplification step in the preparation of the sample nucleic acids. Thus, for example, PCR with labeled primers or labeled nucleotides will provide a labeled amplification product. In another embodiment, transcription amplification, as described above, using a labeled nucleotide (e.g. fluorescein-labeled UTP and/or CTP) incorporates a label into the transcribed nucleic acids. In another embodiment PCR amplification products are fragmented and labeled by terminal deoxytransferase and labeled dNTPs. Alternatively, a label may be added directly to the original nucleic acid sample (e.g., mRNA, polyA mRNA, cDNA, etc.) or to the amplification product after the amplification is completed. Means of attaching labels to nucleic acids are well known to those of skill in the art and include, for example, nick translation or end-labeling (e.g. with a labeled RNA) by kinasing the nucleic acid and subsequent attachment (ligation) of a nucleic acid linker joining the sample nucleic acid to a label (e.g., a fluorophore). In another embodiment label is added to the end of fragments using terminal deoxytransferase.

[0107] Detectable labels suitable for use in the present invention include any composition detectable by spectroscopic, photochemical, biochemical, immunochemical, electrical, optical or chemical means. Useful labels in the present invention include, but are not limited to: biotin for staining with labeled streptavidin conjugate; anti-biotin antibodies, magnetic beads (e.g., Dynabeads™); fluorescent dyes (e.g., Cy3, Cy5, fluorescein, texas red, rhodamine, green fluorescent protein, and the like); radiolabels (e.g., ³H, ¹²⁵I, ³⁵S, ⁴C, or ³²P); phosphorescent labels; enzymes (e.g., horse radish peroxidase, alkaline phosphatase and others commonly used in an ELISA); and colorimetric labels such as colloidal gold or colored glass or plastic (e.g., polystyrene, polypropylene, latex, etc.) beads. Patents teaching the use of such labels include U.S. Pat. Nos. 3,817,837, 3,850,752, 3,939,350, 3,996,345, 4,277,437, 4,275,149 and 4,366,241.

[0108] Means of detecting such labels are well known to those of skill in the art. Thus, for example, radiolabels may be detected using photographic film or scintillation counters; fluorescent markers may be detected using a photodetector to detect emitted light. Enzymatic labels are typically detected by providing the enzyme with a substrate and detecting the reaction product produced by the action of the enzyme on the substrate, and calorimetric labels are detected by simply visualizing the colored label.

[0109] Methods and apparatus for signal detection and processing of intensity data are disclosed in, for example, U.S. Pat. Nos. 5,143,854, 5,547,839, 5,578,832, 5,631,734, 5,800,992, 5,834,758; 5,856,092, 5,902,723, 5,936,324, 5,981,956, 6,025,601, 6,090,555, 6,141,096, 6,185,030, 6,201,639; 6,218,803; and 6,225,625, in U.S. Ser. Nos. 10/389,194, 60/493,495 and in PCT Application PCT/US99/06097 (published as WO99/47964).

### Detection by Microarray

[0110] In certain aspects of the invention, a sample is analyzed by means of a microarray. The nucleic acid molecules of the invention are useful as hybridizable array elements in a microarray. Microarrays generally comprise solid substrates and have a generally planar surface, to which a capture reagent (also called an adsorbent or affinity reagent) is attached. Frequently, the surface of a biochip comprises a plurality of addressable locations, each of which has the capture reagent bound there.

[0111] The array elements are organized in an ordered fashion such that each element is present at a specified location on the substrate. Useful substrate materials include membranes, composed of paper, nylon or other materials, filters, chips, glass slides, and other solid supports. The ordered arrangement of the array elements allows hybridization patterns and intensities to be interpreted as expression levels of particular genes or proteins. Methods for making nucleic acid microarrays are known to the skilled artisan and are described, for example, in U.S. Pat. No. 5,837,832, Lockhart, et al. (Nat. Biotech. 14:1675-1680, 1996), and Schena, et al. (Proc. Natl. Acad. Sci. 93:10614-10619, 1996), herein incorporated by reference. U.S. Pat. Nos. 5,800,992 and 6,040,138 describe methods for making arrays of nucleic acid probes that can be used to detect the presence of a nucleic acid containing a specific nucleotide sequence. Methods of forming high-density arrays of nucleic acids, peptides and other polymer sequences with a minimal number of synthetic steps are known. The nucleic acid array can be synthesized on a solid substrate by a variety of methods, including, but not limited to, light-directed chemical coupling, and mechanically directed coupling. For additional descriptions and methods relating to resequencing arrays see U.S. patent application Ser. Nos. 10/658,879, 60/417,190, 09/381,480, 60/409,396, and U.S. Pat. Nos. 5,861,242, 6,027,880, 5,837,832, 6,723,503.

[0112] By “hybridize” is meant pairing to form a double-stranded molecule between complementary polynucleotide sequences (e.g., a gene described herein), or portions thereof, under various conditions of stringency. (See, e.g., Wahl, G. M. and S. L. Berger (1987) Methods Enzymol. 152:399; Kimmel, A. R. (1987) Methods Enzymol. 152:507). For example, stringent salt concentration will ordinarily be less than about 750 mM NaCl and 75 mM trisodium citrate, preferably less than about 500 mM NaCl and 50 mM trisodium citrate, and more preferably less than about 250 mM NaCl and 25 mM trisodium citrate. Low stringency hybridization can be obtained in the absence of organic solvent, e.g., formamide, while high stringency hybridization can be obtained in the presence of at least about 35% formamide, and more preferably at least about 50% formamide. Stringent temperature conditions will ordinarily include temperatures of at least about 30° C., more preferably of at least about 37° C., and most preferably of at least about 42° C. Varying additional parameters, such as hybridization time, the concentration of detergent, e.g., sodium dodecyl sulfate (SDS), and the inclusion or exclusion of carrier DNA, are well known to those skilled in the art. Various levels of stringency are accomplished by combining these various conditions as needed. In a preferred: embodiment, hybridization will occur at 30° C. in 750 mM NaCl, 75 mM trisodium citrate, and 1% SDS. In a more preferred embodiment, hybridization will occur at 37° C. in 500 mM NaCl, 50 mM trisodium citrate, 1% SDS, 35% formamide, and 100 μg/ml denatured salmon sperm DNA (ssDNA). In a most preferred embodiment, hybridization will occur at 42° C. in 250 mM NaCl, 25 mM trisodium citrate, 1% SDS, 50% formamide, and 200 μg/ml ssDNA. Useful variations on these conditions will be readily apparent to those skilled in the art.

[0113] For most applications, washing steps that follow hybridization will also vary in stringency. Wash stringency conditions can be defined by salt concentration and by temperature. As above, wash stringency can be increased by decreasing salt concentration or by increasing temperature. For example, stringent salt concentration for the wash steps will preferably be less than about 30 mM NaCl and 3 mM trisodium citrate, and most preferably less than about 15 mM NaCl and 1.5 mM trisodium citrate. Stringent temperature conditions for the wash steps will ordinarily include a temperature of at least about 25° C., more preferably of at least about 42° C., and even more preferably of at least about 68° C. In a preferred embodiment, wash steps will occur at 25° C. in 30 mM NaCl, 3 mM trisodium citrate, and 0.1% SDS. In a more preferred embodiment, wash steps will occur at 42° C. in 15 mM NaCl, 1.5 mM trisodium citrate, and 0.1% SDS. In a more preferred embodiment, wash steps will occur at 68° C. in 15 mM NaCl, 1.5 mM trisodium citrate, and 0.1% SDS. Additional variations on these conditions will be readily apparent to those skilled in the art. Hybridization techniques are well known to those skilled in the art and are described, for example, in Benton and Davis (Science 196:180, 1977); Grunstein and Hogness (Proc. Natl. Acad. Sci., USA 72:3961, 1975); Ausubel et al. (Current Protocols in Molecular Biology, Wiley Interscience, New York, 2001); Berger and Kimmel (Guide to Molecular Cloning Techniques, 1987, Academic Press, New York); and Sambrook et al., Molecular Cloning: A Laboratory Manual, Cold Spring Harbor Laboratory Press, New York.

[0114] The microarray can be a biochip, or on a glass slide, bead, or paper.

### Detection by Nucleic Acid Biochip

[0115] In aspects of the invention, a sample is analyzed by means of a nucleic acid biochip (also known as a nucleic acid microarray). To produce a nucleic acid biochip, oligonucleotides may be synthesized or bound to the surface of a substrate using a chemical coupling procedure and an ink jet application apparatus, as described in PCT application WO95/251116 (Baldeschweiler et al.). Alternatively, a gridded array may be used to arrange and link cDNA fragments or oligonucleotides to the surface of a substrate using a vacuum system, thermal, UV, mechanical or chemical bonding procedure. Exemplary nucleic acid molecules useful in the invention include polynucleotides that specifically bind nucleic acid biomarkers to one or more pathogenic organisms, and fragments thereof.

[0116] A nucleic acid molecule (e.g. RNA or DNA) derived from a biological sample may be used to produce a hybridization probe as described herein. The biological samples are generally derived from a patient, e.g., as a bodily fluid (such as blood, blood serum, plasma, saliva, urine, ascites, cyst fluid, and the like); a homogenized tissue sample (e.g., a tissue sample obtained by biopsy); or a cell or population of cells isolated from a patient sample. For some applications, cultured cells or other tissue preparations may be used. The mRNA is isolated according to standard methods, and cDNA is produced and used as a template to make complementary RNA suitable for hybridization. Such methods are well known in the art. The RNA is amplified in the presence of fluorescent nucleotides, and the labeled probes are then incubated with the microarray to allow the probe sequence to hybridize to complementary oligonucleotides bound to the biochip.

[0117] Incubation conditions are adjusted such that hybridization occurs with precise complementary matches or with various degrees of less complementarity depending on the degree of stringency employed. For example, stringent salt concentration will ordinarily be less than about 750 mM NaCl and 75 mM trisodium citrate, less than about 500 mM NaCl and 50 mM trisodium citrate, or less than about 250 mM NaCl and 25 mM trisodium citrate. Low stringency hybridization can be obtained in the absence of organic solvent, e.g., formamide, while high stringency hybridization can be obtained in the presence of at least about 35% formamide, and most preferably at least about 50% formamide. Stringent temperature conditions will ordinarily include temperatures of at least about 30° C., of at least about 37° C., or of at least about 42° C. Varying additional parameters, such as hybridization time, the concentration of detergent, e.g., sodium dodecyl sulfate (SDS), and the inclusion or exclusion of carrier DNA, are well known to those skilled in the art. Various levels of stringency are accomplished by combining these various conditions as needed. In a preferred embodiment, hybridization will occur at 30° C. in 750 mM NaCl, 75 mM trisodium citrate, and 1% SDS. In embodiments, hybridization will occur at 37° C. in 500 mM NaCl, 50 mM trisodium citrate, 1% SDS, 35% formamide, and 100 μg/ml denatured salmon sperm DNA (ssDNA). In other embodiments, hybridization will occur at 42° C. in 250 mM NaCl, 25 mM trisodium citrate, 1% SDS, 50% formamide, and 200 μg/ml ssDNA. Useful variations on these conditions will be readily apparent to those skilled in the art.

[0118] The removal of nonhybridized probes may be accomplished, for example, by washing. The washing steps that follow hybridization can also vary in stringency. Wash stringency conditions can be defined by salt concentration and by temperature. As above, wash stringency can be increased by decreasing salt concentration or by increasing temperature. For example, stringent salt concentration for the wash steps will preferably be less than about 30 mM NaCl and 3 mM trisodium citrate, and most preferably less than about 15 mM NaCl and 1.5 mM trisodium citrate. Stringent temperature conditions for the wash steps will ordinarily include a temperature of at least about 25° C., of at least about 42° C., or of at least about 68° C. In embodiments, wash steps will occur at 25° C. in 30 mM NaCl, 3 mM trisodium citrate, and 0.1% SDS. In a more preferred embodiment, wash steps will occur at 42 C in 15 mM NaCl, 1.5 mM trisodium citrate, and 0.1% SDS. In other embodiments, wash steps will occur at 68 C in 15 mM NaCl, 1.5 mM trisodium citrate, and 0.1% SDS. Additional variations on these conditions will be readily apparent to those skilled in the art.

[0119] Detection systems for measuring the absence, presence, and amount of hybridization for all of the distinct nucleic acid sequences are well known in the art. For example, simultaneous detection is described in Heller et al., Proc. Natl. Acad. Sci. 94:2150-2155, 1997. In certain embodiments, a scanner is used to determine the levels and patterns of fluorescence.

[0120] The practice of the present invention employs, unless otherwise indicated, conventional techniques of molecular biology (including recombinant techniques), microbiology, cell biology, biochemistry and immunology, which are well within the purview of the skilled artisan. Such techniques are explained fully in the literature, such as, “Molecular Cloning: A Laboratory Manual,” fourth edition (Sambrook, 2012); “Oligonucleotide Synthesis” (Gait, 1984); “Culture of Animal Cells” (Freshney, 2010); “Methods in Enzymology” “Handbook of Experimental Immunology” (Weir, 1997); “Gene Transfer Vectors for Mammalian Cells” (Miller and Calos, 1987); “Short Protocols in Molecular Biology” (Ausubel, 2002); “Polymerase Chain Reaction: Principles, Applications and Troubleshooting”, (Babar, 2011); “Current Protocols in Immunology” (Coligan, 2002). These techniques are applicable to the production of the polynucleotides and polypeptides of the invention, and, as such, may be considered in making and practicing the invention. Particularly useful techniques for particular embodiments will be discussed herein.

[0121] The following examples are put forth so as to provide those of ordinary skill in the art with a complete disclosure and description of how to make and use the assay, screening, and therapeutic methods of the invention, and are not intended to limit the scope of what the inventors regard as their invention.

### EXPERIMENTAL EXAMPLES

[0122] The invention is further described in detail by reference to the following experimental examples. These examples are provided for purposes of illustration only, and are not intended to be limiting unless otherwise specified. Thus, the invention should in no way be construed as being limited to the following examples, but rather, should be construed to encompass any and all variations which become evident as a result of the teaching provided herein.

[0123] Without further description, it is believed that one of ordinary skill in the art can, using the preceding description and the following illustrative examples, make and utilize the compounds of the present invention and practice the claimed methods. The following working examples therefore, specifically point out the exemplary embodiments of the present invention, and are not to be construed as limiting in any way the remainder of the disclosure.

[0124] The materials and methods employed in these experiments are now described.

[0125] PathoChip design: The details of PathoChip Arrays v1, v2, v3, and v4 have been previously described (Banerjee et al. (2015) Sci Rep. 5:15162., 10.1038/srep15162; Baldwin et al. (2014) MBio. 5, e01714-01714. doi: 01710.01128/mBio.01714-01714). The PathoChip comprises 60,000 probe sets of sequenced microorganisms from Genbank, which are manufactured as SurePrint glass slide microarrays (Agilent Technologies Inc.), containing 8 replicate arrays per slide. Each probe is a 60-nt DNA oligomer that targets multiple genomic regions of pathogenic viruses, prokaryotic, and eukaryotic microorganisms. Specifically, there are an average of 5-10 target-specific probes per accession, and accessions include approx. 4,200 viruses, 320 bacteria, 360 fungi, 130 protozoa, and 250 helminths. Probes to target regions are conserved between virus families and saturation probe sets are included for selected viral agents.

[0126] The PathoChip technology, combined with PCR and NGS, is also a valuable strategy for detecting and identifying pathogens in breast, oropharyngeal, and ovarian cancers (Banerjee et al. (2015) Sci Rep. 5:15162., 10.1038/srep15162; Banerjee et al. (2017) Sci Rep. 7, 4036. doi: 4010.1038/s41598-41017-03466-41596; Banerjee et al. (2017) Oncotarget 8, 36225-36245. doi: 36210.18632/oncotarget.16717; Baldwin et al. (2014) MBio. 5, e01714-01714. doi: 01710.01128/mBio.01714-01714). Probes and accession annotations are available in the Gene Expression Omnibus (http://wwwdotncbinlmdotnihdotgov/geo/).

[0127] Sample preparation and Microarray processing: DNA and RNA was extracted from samples (Banerjee et al. (2015) Sci Rep. 5:15162., 10.1038/srep15162; Banerjee et al. (2017) Sci Rep. 7, 4036. doi: 4010.1038/s41598-41017-03466-41596; Banerjee et al. (2017) Oncotarget 8, 36225-36245. doi: 36210.18632/oncotarget.16717; Baldwin et al. (2014) MBio. 5, e01714-01714. doi: 01710.01128/mBio.01714-01714) and used for screening. The quality of extracted nucleic acids was determined by agarose gel electrophoresis and the A260/280 ratio. The extracted RNA and DNA samples were subjected to whole genome and transcriptome amplification (referred here as WTA) using TransPlex Complete Whole Transcriptome Amplification Kit (Sigma-Aldrich, St. Louis, Mo.) using 50 ng each of RNA and DNA as input and manufacturers protocol. The WTA products were analyzed by agarose gel electrophoresis and showed a range of 200-400 bp amplicon sizes and no contamination in the non-template control used during WTA. Human reference RNA and DNA were also extracted and 15 ng of each were used for WTA. The WTA products were purified, (PCR purification kit, Qiagen, Germantown, Md., USA), and 2 μg of the amplified products was labelled with Cy3 and that from the human reference was labelled with Cy5 (SureTag labeling kit, Agilent Technologies, Santa Clara, Calif.) as per manufacturer's protocol. Human reference DNA and RNA was used to determine cross-hybridization of probes to human DNA. The labelled cDNA/DNAs were purified and the efficiencies of labeling were determined by measuring absorbance at 550 nm (for Cy3) and 650 nm (for Cy5). The labelled samples (Cy3 plus Cy5) were hybridized to the PathoChip as described previously (Banerjee et al. (2015) Sci Rep. 5:15162., 10.1038/srep15162; Banerjee et al. (2017) Sci Rep. 7, 4036. doi: 4010.1038/s41598-41017-03466-41596; Banerjee et al. (2017) Oncotarget 8, 36225-36245. doi: 36210.18632/oncotarget.16717; Baldwin et al. (2014) MBio. 5, e01714-01714. doi: 01710.01128/mBio.01714-01714). The hybridization cocktail (CGH blocking agent and hybridization buffer), was added to each of the labeled test sample (Cy3) mixed with reference (Cy5), denatured and hybridized to the arrays in 8-chamber gasket slides. The slides were incubated at 65° C. with rotation and washed, then scanned for visualization using an Agilent SureScan G4900DA array scanner.

[0128] Microarray Data Extraction and Statistical analysis: Microarray data were extracted and analyzed as described previously (Banerjee et al. (2015) Sci Rep. 5:15162., 10.1038/srep15162; Banerjee et al. (2017) Sci Rep. 7, 4036. doi: 4010.1038/s41598-41017-03466-41596; Banerjee et al. (2017) Oncotarget 8, 36225-36245. doi: 36210.18632/oncotarget.16717; Baldwin et al. (2014) MBio. 5, e01714-01714. doi: 01710.01128/mBio.01714-01714). The raw data from the microarray images were extracted using Agilent Feature Extraction software. The R program was used for normalization and data analyses. Scale factor was calculated using the signals of green and red channels for human probes. Scale factors are the sum of green/sum of red signal ratios of human probes. Scale factors were then used to obtain normalized signals for all other probes. For all probes except human probes, normalized signal is log 2 transformed of green signals/scale factors modified red signals (log 2 g−log 2 scale factor*r). On the normalized signals, t-test is applied to select probes significantly present in test samples (virus samples) by comparing test samples versus controls and to select probes significantly present in the test samples versus the controls. The significance cut-off was log 2 fold change >1 and adjusted p value (with multiple testing corrections)<0.05. Prevalence was calculated by counting the number of test cases with hybridization signal greater than the average signal of dark corner or negative control probes, and represented as a percentage.

[0129] Analysis at the individual probe level (both for specific and conserved probes), and at the accession (for viruses) or genera (for bacteria, fungi and parasite) level, taking into account all the probes per accession or genera, were performed. Microbial detections were ranked based on their total hybridization signal (sum of hybridization signal per accession or genera) and prevalence. Conserved probe analysis was also performed in which signals from individual probes targeting conserved sequences shared by two or more organisms in a family were measured. MAT Analysis assigned detection scores derived from multiple adjacent probes that are covered per sliding window.

[0130] Probe Capture and Next Generation Sequencing: Probe Capture was performed to vailidate PathoChip results, as previously described (Banerjee et al. (2015) Sci Rep. 5:15162., 10.1038/srep15162; Banerjee et al. (2017) Sci Rep. 7, 4036. doi: 4010.1038/s41598-41017-03466-41596; Banerjee et al. (2017) Oncotarget 8, 36225-36245. doi: 36210.18632/oncotarget.16717; Baldwin et al. (2014) MBio. 5, e01714-01714. doi: 01710.01128/mBio.01714-01714). Briefly, the WTA products of the samples were pooled together for hybridization with selected biotinylated probes that were identified for microbial signatures target samples by the PathoChip screen. The targeted sequences were then captured by Streptavidin coated magnetic beads and libraries were generated for NGS. The selected probes were synthesized as 5′-biotinylated DNA oligomers (Integrated DNA Technologies, Coralville, Iowa, USA), pooled together, and hybridized to WTA pools. The capture probe pool was added separately to each of the pooled WTAs (150 ng) in 6 separate reaction mixtures (Pr1-6) containing 3 M tetra-methyl ammonium chloride, 0.1% Sarkosyl, 50 mMTris-HCl, 4 mM EDTA, pH 8.0 (1×TMAC buffer). The reaction mixtures were denatured (100° C. for 10 mins) followed by a hybridization step (60° C. for 3 hours). Streptavidin Dynabeads (Life Technologies, Carlsbad, Calif., USA) were added with continuous mixing at room temperature for 2 hours, followed by three washes of the captured bead-probe-target complexes in 0.30 M NaCl plus 0.030 M sodium citrate buffer (2×SSC) and three washes with 0.1×SSC. Captured single-stranded target DNA was eluted in Tris-EDTA and used for library preparation using Nextera XT sample preparation kit (Illumina, San Diego, Calif., USA) followed by NGS (Banerjee et al. (2015) Sci Rep. 5:15162., 10.1038/srep15162; Banerjee et al. (2017) Sci Rep. 7, 4036. doi: 4010.1038/s41598-41017-03466-41596; Banerjee et al. (2017) Oncotarget 8, 36225-36245. doi: 36210.18632/oncotarget.16717; Baldwin et al. (2014) MBio. 5, e01714-01714. doi: 01710.01128/mBio.01714-01714). The 5 libraries were examined for quality control and submitted for NGS using an Illumina MiSeq instrument with paired-end 250-nt reads. Adapters and low-quality fragments of raw reads were first removed using the Trim Galore software (http://wwwdotbioinformaticsdotbabrahamdot acdotuk/projects/trim_galore/). The processed reads were then aligned to the metagenome and the human genome using Genomic Short-read Nucleotide Alignment Program (GSNAP) (Wu et al. (2010) Bioinformatics. 26, 873-881. doi: 810.1093/bioinformatics/btq1057. Epub February 2010) with default parameters. After alignment featureCounts (Liao et al. (2014) Bioinformatics. 30, 923-930. doi: 910.1093/bioinformatics/btt1656. Epub 213 November 1013) were employed to count how many reads aligned to each of the capture probe regions. The detailed results for these capture probes were visualized in IGV 71.

[0131] Microbial Fusion Detection: Microbial genomic insertion in somatic host chromosome was determined as previously described (Banerjee et al. (2015) Sci Rep. 5:15162., 10.1038/srep15162; Banerjee et al. (2017) Sci Rep. 7, 4036. doi: 4010.1038/s41598-41017-03466-41596). Prior to fusion detection, quality control of sequenced reads was performed. The Trim Galore software (http://wwwdotbioinformaticsdotbabrahamdot acdotuk/projects/trim_galore/) was employed for quality trimming of raw reads in order to remove adapters and low-quality fragments. Virus-Clip (Ho et al. (2015) Oncotarget. 6, 20959-20963) was used to identify the virus fusion sites in the human genome. Specifically, the virus genome was used as the primary read alignment target, and reads were first aligned to the PathoChip genome. Some mapped reads contained soft-clipped segments. Soft-clipped reads were extracted from the alignment and mapped (containing sequences of potential pathogen-integrated human loci) to the human genome. Utilizing this mapping information, the exact human and pathogen integration breakpoints at single-base resolution were identified. All the integration sites were then automatically annotated with the affected human genes and their corresponding gene regions.

[0132] Some of the host genes that supported viral genomic insertions by high sequence reads were subjected to Ingenuity Pathway Analysis (IPA) (Kramer et al. (2014) Bioinformatics. 30, 523-530. doi: 510.1093/bioinformatics/btt1703. Epub 213 December 1013) that helped to combine the host genes with knowledge extracted from the literature to predict likely outcomes. IPA software provided a statistical significance of the association of those genes with the disease outcome.

[0133] PCR validations of PathoChip detections and microbial genomic insertions: PCR primers from the conserved and/or specific regions of the microorganisms detected by PathoChip screen were used for detection validations. For the validation of microbial insertions, PCR primers were designed so that the fusion junction could be amplified, one primer being designed from the microbial sequence, while the other from the affected human gene sequence. The PCR amplification reaction mixtures for each reaction contained 200-400 ng of WTA product and 20 pm each of forward and reverse primers, 300 μM of dNTPs and 2.5U of LongAmp Taq DNA polymerase (NEB). DNA was denatured at 94° C. for 3 min, followed by 30 cycles of 94° C. for 30 s, different annealing temperature for different set of primers (generally 3 to 5 degree below melting temperature) for 30 s, and 65° C. for 30 s. The amplicons were gel extracted Sanger sequenced. The electropherograms were visualized using the BioEdit program (TA, H. (1999) Nucleic Acids Symposium Series 41, 95-98) and the sequences were subjected to NCBI BLAST for identification.

[0134] The results of the experiments are now described.

### Example 1: Technology Development for Identification of SARS-CoV-2, the Causative Agent of Covid-19

[0135] The PathoChIP v4 (Banerjee et al. (2015) Sci Rep. 5:15162., 10.1038/srep15162; Baldwin et al. (2014) MBio. 5, e01714-01714. doi: 01710.01128/mBio.01714-01714) was modified to include detection of Coronaviruses, including SARS-CoV-2. A bioinformatics approach was utilized to design unique and conserved probes specific for Coronaviruses. Briefly, genomic sequences in fasta format were downloaded from the NCBI website for 3 human coronaviruses (MERS, SARS and SARS-CoV-2). A pairwise alignment between SARS and SARS-CoV-2, and SARS and MERS, was then performed using stretcher (https://wwwdotebidotacdotuk/Tools/psa/emboss stretcher/) to identify the co-linear domains of the viral agents. This identified the percentage of conserved genome that maintains the Coronaviridae family. Furthermore, the regions that are unique to each of the virus were identified. The aligned sequences were then scanned using a sliding window of 60 nucleotides and the identity score computed for each window. This methodology was then accepted as stringent since regions that had greater than 42/60 nucleotides matching were considered conserved and regions less than 24/60 nucleotides matching were considered unique sequences. All segments were then concatenated into conserved and unique sequences. The unique sequence regions were blasted against the PathoChIP database of 60 synthetic chromosomes to ensure its specificity, which showed no significant hits. These regions were selected for probe design. During this design process the probes were then screened against the human genome, mouse genome and Arabidopsis thaliana genomes to determine if any cross hybridization occured with any known genomes. This enhanced the specificity of the probes selected by reducing the possibility of signals on the arrays due to sequences from other genomes.

[0136] To design probes for SARS-CoV-2 and the other coronaviruses infecting humans, SARS and MERS, the selected regions were put through the Agilent CGH pipeline for probe design, which was used for the previous designs of PathoChIP v2, v3 and v4. Based on this pipeline a total of 1,147 probes were selected with probe score information on sequence homology with viral genomes, secondary structures and base composition for example. The resulting probes were also scored against the human genome to check for cross hybridization with human genome DNA to ensure that there was not any background on the array from genomic DNA. Based on this information for unique and conserved probes generated for these viruses and the strategy for selection of a minimum of 5 unique and 5 conserved probes for each pathogen, 8 unique probes for SARS-CoV-2 and 5 conserved probes were selected. Furthermore, 3 probes specifically located in SARS-CoV-2 mutation regions were also selected. Therefore, a total of 37 probes (FIG. 5, SEQ ID NOs: 1-37) were selected and added to the PathoChIP as a revised version, v5. This was in the same format as the previous v4 in an 8×60000 design format of glass slide.

### Example 2: Validation of the Assay for SARS-CoV-2

[0137] The probes were first tested for their ability to uniquely detect the SARS-CoV-2 virus. To validate the assay, samples were obtained from the NII/NIAID Biodefense and Emerging Infections (BEI) Research Resources Repository, who provided genomic RNA for SARS-CoV-2, synthetic RNA, or regions of the SARS-CoV-2 that can be used for testing specific probes or as a negative control if they belong to a region that does not contain the selected probes.

[0138] RNA and DNA was extracted from each sample. RNA was separated for reverse transcription and cDNA synthesis, then the DNA and RNA fractions were combined (50 ng each) and amplified. This was used for generation of increased pools of viral sequences. Nucleic acids were labeled with Cy5 and Cy3 fluorescent labels. Human genomic DNA was also labelled so that they both could be mixed and hybridized to an array containing SARS-CoV-2 specific probes. Samples were hybridized for 12 hours, washed, scanned, and then transferred to the informatics pipeline for extraction of the data and analyses for identification of the SARS-CoV-2 probes.

[0139] This rapid test for detection of SARS-Cov2 coronavirus has shown high sensitivity and accuracy.

### Example 3: The Immunome ChIP

[0140] Probes were engineered bioinformatically for over 1,720 immune markers to cover all innate and adaptive responses to infections, inflammatory, immune disorders, metabolism and toxicological responses (Table 1; SEQ ID NOs: 38-4671). Unique probes were generated that provide a snapshot of the immune response to SARS-CoV-2, which allows for stratification of the patients who may be at greater risk for development of disease severity. These probes can used in conjunction with the PathoChip (Immunome ChIP or ImmunoChIP), providing a test that concomitantly covers all known respiratory pathogens including other coronaviruses from bats, and other mammals, providing accurate and efficient detection of SARS-CoV-2, as well as other respiratory pathogens and cytokines associated with the Covid-19 disease. The benefits of this test include the sensitivity and accuracy from using multiple probes across the genome to avoid negative results if one probe fails in the assay screen. The overall screen can be used in a research lab setting as well as in a clinical lab.

[0141] The Immunome ChIP determines unique signature responses from each unique antigen, providing the ability to stratify patients based on disease severity due to immune response and co-infections.

### OTHER EMBODIMENTS

[0142] The recitation of a listing of elements in any definition of a variable herein includes definitions of that variable as any single element or combination (or subcombination) of listed elements. The recitation of an embodiment herein includes that embodiment as any single embodiment or in combination with any other embodiments or portions thereof.

[0143] The disclosures of each and every patent, patent application, and publication cited herein are hereby incorporated herein by reference in their entirety. While this invention has been disclosed with reference to specific embodiments, it is apparent that other embodiments and variations of this invention may be devised by others skilled in the art without departing from the true spirit and scope of the invention. The appended claims are intended to be construed to include all such embodiments and equivalent variations.

| SEQ ID | | |
|---|---|---|
| NO: | Molecule | Probe |
| SEQ ID | ref\|NM_001204402.11 | TTTCATCTTCCTTCT |
| NO: 38 | Homo sapiens phosphoribosyl | TTGGATCTATTTGGC |
| | pyrophosphate synthetase 1 (PRPS1), | CTCTCAAATGAACTG |
| | | AGATTCCTGTTAAAA |
| SEQ ID | GI 397938 Z22576 H. sapiens CD69 gene | GGGATGATCGTGTAT |
| NO: 39 | | TTATTTTTTTACTTC |
| | | CTCAGCTGTAGACAG |
| | | GTCCCTTTCGATGGT |
| SEQ ID | GI 401709925 NM_015953 | GAGTTTGAAAGAGCG |
| NO: 40 | Homo sapiens nitric oxide synthase | GGCTAAGCATATTGA |
| | interacting protein (NOSIP), transcript | ATGTGGTCTCACATT |
| | variant 1, mRNA | AAGAACAAAATCTGG |
| SEQ ID | ref\|NG_029387.2\| | CTCTATGACCTCATC |
| NO: 41 | Homo sapiens V-set pre-B cell | TAACCTTCATTAACT |
| | surrogate light chain 1 (VPREB1), | CCTTAAAGGCCCTAT |
| | | CTCCAAATACAGGCA |
| SEQ ID | GI 194353939 NG 008255 | GAAACACAGGGAGAG |
| NO: 42 | Homo sapiens solute carrier | AAACATGTTCCCAGT |
| | family 19 member 2 (SLC19A2), | GTTGATATTTGAAAG |
| | RefSeqGene on chromosome 1 | CTGATCTGTTTTGTC |
| SEQ ID | GI 283806588 NG_016341 | CATTAGGAAGGAAAG |
| NO: 43 | Homo sapiens cyclin dependent | GAACAGAAAATGAAC |
| | kinase inhibitor 1B (CDKN1B), | CAACCTGAGTGTTAG |
| | RefSeqGene on chromosome 12 | GAGACTTGCATCTAG |
| SEQ ID | GI 345842406 NM_005849 | GAAACGTTTTAATTT |
| NO: 44 | Homo sapiens immunoglobulin | TCAATGAAGTCACTG |
| | superfamily member 6 (IGSF6), | AAAATCCAACTCCAG |
| | mRNA | GAGCTATGGCAGTGT |
| SEQ ID | GI 312434026 NM_002995 | TTAGAGTCCAGCTTG |
| NO: 45 | Homo sapiens X-C motif chemokine | TAATGGTTCTTTACA |
| | ligand 1 (XCL1), mRNA | CATCAGTCACAAGTT |
| | | ACAGCTGTGACAATG |
| SEQ ID | GI 1216866539 NG_012872 | ATAGAAGAGTAGACT |
| NO: 46 | Homo sapiens gelsolin (GSN), | GCACAGTATCAGTAG |
| | RefSeqGene on chromosome 9 | TGTGACCTCCAGAGA |
| | | GTACTTAACCCTTTC |
| SEQ ID | GI 224922763 NG_011563 | GAATAAAATGGCTGG |
| NO: 47 | Homo sapiens hepcidin antimicrobial | TTCTTTTGTTTTCCA |
| | peptide (HAMP), RefSeqGene on | AACCAGAGTGTCTGT |
| | chromosome 19 | TGTCCTTTCTCTCTG |
| SEQ ID | GI 298919225 NG_023030 | GAAACATCTTGGAAA |
| NO: 48 | Homo sapiens heme oxygenase 1 | CTTCCAAAAAGACCA |
| | (HMOX1), RefSeqGene on | AAGTGCTCCACAAAA |
| | chromosome 22 | TGTACCCTCACTAAG |
| SEQ ID | GI 654825103 NG_029876 | CAAGTAGTTCCTACC |
| NO: 49 | Homo sapiens C-C motif chemokine | ACACCTGAGTTTATG |
| | ligand 23 (CCL23), RefSeqGene on | TCAATGAAGTGACTT |
| | chromosome 17 | TTGGAAAGCCTTAGG |
| SEQ ID | GI 307611978 NM_005409 | TACGCTATGGGATAC |
| NO: 50 | Homo sapiens C-X-C motif chemokine | TGGCAAAAGTGCACA |
| | ligand 11 (CXCL11), transcript | TATTTCATAACCAAA |
| | variant 1, mRNA | TTAGTAGCACCAGTC |
| SEQ ID | GI 29501801 AY260471 | CACAGACAACATTTA |
| NO: 51 | Homo sapiens BCL2-antagonist/killer 1 | TAGAACACATACTGT |
| | (BAK1) gene, complete cds | GTGCCAGGCTTTATG |
| | | CTGAGAGTTCATCAT |
| SEQ ID | GI 119703747 NM_001432 | CTCTCAGCTGATGTG |
| NO: 52 | Homo sapiens epiregulin (EREG), mRNA | TCCTGTACACAGTGG |
| | | GAAGATTTTAGTTCA |
| | | CACTTAGTCTAACTC |
| SEQ ID | GI 291463310 NM_002169 | CAACATCGAAATGAT |
| NO: 53 | Homo sapiens interferon alpha 5 | TCTCATTGACTAGTA |
| | (IFNA5), mRNA | CACCATTTCACACTT |
| | | CTTGAGTTCTGCCGT |
| SEQ ID | GI 149408121 NM_024119 | TAGACATTTTCATAT |
| NO: 54 | Homo sapiens DExH-box helicase 58 | GCACTGGATGGAGTT |
| | (DHX58), mRNA | AGGGAAACTGAGGCA |
| | | AAAGAATTTGCCATA |
| SEQ ID | GI 149408158 NM_005259 | AGAGGTTGGCTTTCA |
| NO: 55 | Homo sapiens myostatin (MSTN), | ATTCTGTAGCATACT |
| | mRNA | TGGAGAAACTGCATT |
| | | ATCTTAAAAGGCAGT |
| SEQ ID | GI 117606571 EF064760 | CTGATTCAGCGGATC |
| NO: 56 | Homo sapiens chemokine (C-C motif) | TAGAATGAGACACAA |
| | receptor 3 (CCR3) gene, complete cds | GAATGTGCTTAGCAT |
| | | CACTAGCAAGTTTTC |
| SEQ ID | GI 1036031503 AHO11685 | CAAGGGTAACCATTG |
| NO: 57 | Homo sapiens chromosome 1 AMPK | ACTTAGCAGTCTCAT |
| | beta-2 subunit (PRKAB2) gene, | TTTAGCTGTCATTTC |
| | complete cds | TGTCAAGACTGATGG |
| SEQ ID | GI 351542176 NG_030342 | GGAACGCTTCCAGCT |
| NO: 58 | Homo sapiens collectin subfamily | CTTTGAGACGGATAT |
| | member 12 (COLEC12), RefSeqGene | TGTGAACATCATTAG |
| | on chromosome 18 | CAATATCAGTTACAC |
| SEQ ID | GI 341572559 NG_029522 | CCTAACCTTCATTCT |
| NO: 59 | Homo sapiens tachykinin receptor 1 | TAGTTTTACACTAGC |
| | (TACR1), RefSeqGene on chromosome 2 | ATCGTGCTCATATGT |
| | | GCGACAAGCAAGAAG |
| SEQ ID | GI 1220516002 NM_023003 | TAGTGCCAACAGTAG |
| NO: 60 | Homo sapiens transmembrane 6 | TGAGCATGAAATGAA |
| | superfamily member 1 (TM6SF1), | ACTATTCAAAAGAGA |
| | transcript variant 1, mRNA | ATATGGCCTGTGCAT |
| SEQ ID | GI 1126528245 AF058925 | CTTTAGGGATCTAGC |
| NO: 61 | Homo sapiens Jak2 kinase mRNA, | TCTTCGAGTGGATCA |
| | complete cds | AATAAGGGATAACAT |
| | | GGCTGGATGAAAGAA |
| SEQ ID | GI 209870110 NM_013943 | CTTTAATTTGGAGAC |
| NO: 62 | Homo sapiens chloride intracellular | ACTCCACCACAAACT |
| | channel 4 (CLIC4), mRNA | TTTCACTTTAGAGGT |
| | | AGCTTGCCATCTCTC |
| SEQ ID | GI 300244555 NG_023331 | ATGGTCATTCTTCTC |
| NO: 63 | Homo sapiens matrix Gia protein | TTTTCTGCCTGAGAG |
| | (MGP), RefSeqGene on chromosome 12 | TAGGTGGAATAGGAG |
| | | ATCTGTATTACTCCA |
| SEQ ID | GI 401709984 NG_032897 | AATCAAGAGCCAAAG |
| NO: 64 | Homo sapiens platelet factor 4 | TCATTCTTTCTCAGA |
| | (PF4), RefSeqGene on chromosome 4 | GAAGGGAAGACTGTC |
| | | CATATGGATCTCTTC |
| SEQ ID | GI 217035112 NM_152672 | CTCATACTGGAGACT |
| NO: 65 | Homo sapiens solute carrier | TTTCTAATGACTGTG |
| | family 51 alpha subunit (SLC51A), | CTGACACGAATGTAC |
| | mRNA | TACCGAAGGAAAGAC |
| SEQ ID | GI 255958254 NG_012690 | GACAAGAGTTGTAAC |
| NO: 66 | Homo sapiens flavin containing | TTGGGCTCTGAAGAA |
| | monooxygenase 3 (FMO3), RefSeqGene | AGGAAACAAGGCAAT |
| | on chromosome 1 | TTATGGGGAAAATTG |
| SEQ ID | GI 669033292 NM_006798 | AATTTCCATATACCA |
| NO: 67 | Homo sapiens UDP | AACAAATCAGGGAGC |
| | glucuronosyltransferase family 2 | CACCGTAGGAGAGTA |
| | member A1 complex locus (UGT2A1), | GTGTGTTATGAGAAA |
| | transcript varian [symbol] | |
| SEQ ID | GI 24286757 AY163769 | TTCATAAGAAAGGCA |
| NO: 68 | Homo sapiens excision repair cross- | TTGGTATCACCAAAG |
| | complementing rodent repair deficiency, | CACTTTGCAAGAGAG |
| | complementation group 3 (xeroc [symbol] | GCTTAGGGTTATATG |
| SEQ ID | GI 238018066 NG_012196 | CTATACAACAACCAC |
| NO: 69 | Homo sapiens fibronectin 1 (FN1), | AATTACACTGATTGC |
| | RefSeqGene on chromosome 2 | ACTTCTGAGGGCAGA |
| | | AGAGACAACATGAAG |
| SEQ ID | GI 793956 L41915 | EATGCTATGTCAAGA |
| NO: 70 | Homo sapiens retinoblastoma | CTGTTGAAGAAGTAT |
| | susceptibility protein (RB1) | GATGTATTGTTTGCA |
| | gene from tumor GOS537, exon 4, | CTCCCAGCAAATTGG |
| | (complete) bases 4179 [symbol] | A |
| SEQ ID | GI 225735577 NG_011719 | GGTAAGGTGACCAAG |
| NO: 71 | Homo sapiens integrin subunit | AGCTCTAGTTTGCTT |
| | alpha M (ITGAM), RefSeqGene on | AACTCTGTCCCAGAT |
| | chromosome 16 | TTAGTACTGAAATCC |
| SEQ ID | GI 543583730 NM_006601 | TTTTACATCTCTTAG |
| NO: 72 | Homo sapiens prostaglandin E | CATGGAGGACGAAGA |
| | synthase 3 (PTGES3), transcript | AAGCTGTACATTGTT |
| | variant 1, mRNA | GCTTGAGAGTCTGTA |
| SEQ ID | GI 225903414 NG 011740 | CAATTTCCTGTCCAA |
| NO: 73 | Homo sapiens matrix metallopeptidase 1 | TCACAGATGGTCACA |
| | (MMP1), RefSeqGene on chromosome 11 | TGCTGCTTTCCTGAG |
| | | TTAACCTATTAACTC |
| SEQ ID | GI 342837710 NG_029639 | TTTAGAGAGTTTTGG |
| NO: 74 | Homo sapiens inhibitor of DNA binding 1, | TGTGTGTGGTAAGGG |
| | HLH protein (ID1), RefSeqGene on | GATGAGGAGTCTGGC |
| | chromosome 20 | TAATTAATTGATGAT |
| SEQ ID | GI 31096355 AY300794 | AGTGGAGGATTTAGG |
| NO: 75 | Homo sapiens PRKC, apoptosis, WT1, | ACTAAGGGATTGCTA |
| | regulator (PAWR) gene, complete cds | AGGAAGGAAAATAAG |
| | | GAGTCTTGCTCTTTG |
| SEQ ID | GI 343790995 NG_029773 | GAAAGAGCATATGAA |
| NO: 76 | Homo sapiens activating transcription | GGCAGTTAAGTAAGG |
| | factor 6 (ATF6), RefSeqGene on | CAGGAAAGAGCTTTA |
| | chromosome 1 | TTTGAGGCACTGAAA |
| SEQ ID | GI 22538815 NM_005623 | CCAAATATTTCAAAA |
| NO: 77 | Homo sapiens C-C motif chemokine | TCTGAAGCCATGAGC |
| | ligand 8 (CCL8), mRNA | CTTCATACATGGACT |
| | | GAGAGTCAGAGCTTG |
| SEQ ID | GI 1005261235 NM_000399 | AGGTTCTTCCTAAAA |
| NO: 78 | Homo sapiens early growth response 2 | CTTAGCCCATTCTAG |
| | (EGR2), transcript variant 1, mRNA | TCTCTCTTAGGTGAG |
| | | TTGACTATCAACCCA |
| SEQ ID | GI 40787172 AY513239 | AATTACCAATGGGAA |
| NO: 79 | Homo sapiens complement component 3 | AGCTAAGGTGAGTTC |
| | (C3) gene, complete cds | CAAGTTTGGCTTCAC |
| | | CAGAGAAAACTAATT |
| SEQ ID | GI 692314725 NM_002416 | ACCACTTTATTTCTT |
| NO: 80 | Homo sapiens C-X-C motif chemokine | TTTGTTCCCCTTTGC |
| | ligand 9 (CXCL9), mRNA | TTCATTCAAGTCAGC |
| | | TCTTCTCCATCCTAC |
| SEQ ID | GI 954169997 NM_002177 | TTTGCCATATAACAC |
| NO: 81 | Homo sapiens interferon omega 1 | TTGCACATGTGACTC |
| | (IFNW1), mRNA | TGGTCAATTCAAAAG |
| | | ACTCTTATTTCGGCT |
| SEQ ID | GI 41393574 NM_033214 | GTAGAGCTCTTTTTG |
| NO: 82 | Homo sapiens glycerol kinase 2 | GTACCATTGATTCAT |
| | (GK2), mRNA | GGCTTATCTGGAGTT |
| | | TGACAGGAGGAGTTA |
| SEQ ID | GI 313665837 NM_152230 | GTATTACAACTGTGA |
| NO: 83 | Homo sapiens inositol polyphosphate | ACCAAACGGATAAGG |
| | multikinase (IPMK), mRNA | CCCTAACCATTTTCA |
| | | GCATTCTCTTTGGAT |
| SEQ ID | GI 735661405 NM_002201 | CTTATTCTTCTCTCC |
| NO: 84 | Homo sapiens interferon stimulated | AAGCTGGGTTAACAG |
| | exonuclease gene 20 (ISG20), | TAGACAGGACCCATT |
| | transcript variant 1, mRNA | TCTGTGTGATGTTAG |
| SEQ ID | GI 219879808 NM_000922 | AAGTCATTTCCTCTC |
| NO: 85 | Homo sapiens phosphodiesterase | TACGGAGTATTAGTA |
| | 3B (PDE3B), mRNA | GCTTAATGGGTGCTT |
| | | TCTCAGGTTCCTGTA |
| SEQ ID | GI 209977034 NM_021995 | AGAAACGTGAGACTC |
| NO: 86 | Homo sapiens urotensin 2 (UTS2), | CTGATTGCTTCTGGA |
| | transcript variant 1, mRNA | AATACTGTGTCTGAA |
| | | GTGAAATAAGCATCT |
| SEQ ID | GI 1024846802 NG_046996 | TCAGATATGTTCTAT |
| NO: 87 | Homo sapiens mediator complex | GTGGAAGTGCAGTTA |
| | subunit 1 (MED1), RefSeqGene on | GATCCTGCAGGACAG |
| | chromosome 17 | CTTTGTGATGTAAAA |
| SEQ ID | GI 590122055 NM_021649 | AGTCCAGAATCTGCT |
| NO: 88 | Homo sapiens toll like receptor | ACAAGATGACTTTGG |
| | adaptor molecule 2 (TICAM2), mRNA | TATCAAACCCGGAAT |
| | | AATCTTTGCTGAGAT |
| SEQ ID | GI 32165625 AY323826 | TAGATTCAGGAGATT |
| NO: 89 | Homo sapiens interleukin 10 | GTATTTCCCTAGCAT |
| | receptor, beta (IL10RB) gene, | CCAACAGGCATGTCC |
| | complete cds | AAATGTCATCTCTTT |
| SEQ ID | GI 291045457 NG_016717 | GTTTCCTTTATTGCA |
| NO: 90 | Homo sapiens phosphoribosyl | GTCTTTGAGCTCTGT |
| | pyrophosphate synthetase 2 (PRPS2), | TTCCTATTCTGAAAG |
| | RefSeqGene on chromosome X | CATAATGCCCAGGAA |
| SEQ ID | GI 166158920 NM_013996 | AAAGAAAAAAAATCA |
| NO: 91 | Homo sapiens tachykinin precursor 1 | TTGCTTTGAAGCAGT |
| | (TAC1), transcript variant alpha, | TGTGTCAGCTACTGC |
| | mRNA | GGAAAAGGAAGGAAA |
| SEQ ID | GI 78482607 NM_021129 | TTTCACATGGTAGTT |
| NO: 92 | Homo sapiens pyrophosphatase | GAAGTACCACGCTGG |
| | (inorganic) 1 (PPA1), mRNA | TCTAATGCAAAAATG |
| | | GAGATTGCTACAAAG |
| SEQ ID | GI 212549700 NG_008949 | CTGTGGTGTTAGTTA |
| NO: 93 | Homo sapiens apolipoprotein C3 | CTTCTGAGAGGACAG |
| | (APOC3), RefSeqGene on chromosome 11 | CTTGCTGCCAGAGCT |
| | | CTATTTTTTATGTTA |
| SEQ ID | GI 340805888 NG_029485 | ATGAGAATATGCAGG |
| NO: 94 | Homo sapiens ATPase plasma | TCATACTGGGGAGGG |
| | membrane Ca2+ transporting 1 | GAATATCTGGTTGTA |
| | (ATP2B1), RefSeqGene on chromosome 12 | TAGTTCAGCTGAATA |
| SEQ ID | GI 1028224151 NG_008493 | CTGAAGACACTGGGT |
| NO: 95 | Homo sapiens estrogen receptor 1 | ACATCTGTTATGGTC |
| | (ESR1), RefSeqGene on chromosome 6 | CCTGTGTACACTCGG |
| | | ATATTCTAAATGAGA |
| SEQ ID | GI 442092991JQ924061 | CTTCGAGATGTGTGG |
| NO: 96 | Homo sapiens ATG5 (ATG5) mRNA, | TTTGGACGAATTCCA |
| | complete cds | ACTTGTTTCACGCTA |
| | | TATCAGGATGAGATA |
| SEQ ID | GI 261823945 NG_013238 | CTTTTGTTTATGAGT |
| NO: 97 | Homo sapiens interleukin 9 receptor | GTGCATGCAAGTGTG |
| | (IL9R), RefSeqGene on chromosome | ATGAGTGTGAAAGTG |
| | X and Y | TTCCTGTAGACATGT |
| SEQ ID | GI 295842487 NM_014470 | TCTGAACTCATCTCT |
| NO: 98 | Homo sapiens Rho family GTPase 1 | TCTACCTTCAAGAAG |
| | (RND1), mRNA | GAAAAGGCCAAAAGC |
| | | TGTTCCATTATGTGA |
| SEQ ID | GI 224809340 NG_011507 | ACACCAAATGTTACA |
| NO: 99 | Homo sapiens glutamate ionotropic | TTAGCACACACTCAT |
| | receptor NMDAtype subunit 1 (GRIN1), | GCACCTCAGCATCAC |
| | RefSeqGene on chromosome [symbol] | ACAATCAATTTCATA |
| SEQ ID | GI 68160936 NM_005082 | CAAATGTGCAGCTCA |
| NO: 100 | Homo sapiens tripartite motif | GGATAGGGAAGCATA |
| | containing 25 (TRIM25), mRNA | AGACCCTCTGTTTAA |
| | | AAGAGAGTCAAGTAG |
| SEQ ID | GI 589269250 NG_007475 | TCCTCTCCACTCTTT |
| NO: 101 | Homo sapiens aquaporin 1 | CAGTAACTGATTCAG |
| | (Colton blood group) (AQP1), | ACTTGATGAGTCTTT |
| | RefSeqGene on chromosome 7 | CCCCTTTCTCTCATC |
| SEQ ID | GI 299829203 NG_023197 | CAATATGCTACAAAG |
| NO: 102 | Homo sapiens parathyroid | GGCTTCACCACTCCT |
| | hormone like hormone (PTHLH), | AGAGAAGAAACTGTC |
| | RefSeqGene on chromosome 12 | CAATTTTCCTGAGAT |
| SEQ ID | GI 223972657 NG_009817 | ATTTTGTTTATTTCA |
| NO: 103 | Homo sapiens E1A binding protein | ATTGCTGAACTGGCT |
| | p300 (EP300), RefSeqGene on | GAGCTTTTACTCTCC |
| | chromosome 22 | CCACCTTAGGTTGTT |
| SEQ ID | GI 83699682 DQ314888 | GCATCTGTGTGAAAT |
| NO: 104 | Homo sapiens v-rel | CTCAGGATATAGTGT |
| | reticuloendotheliosis viral | CCACTAAACTTCAGT |
| | oncogene homolog (avian) (REL) | GCACTGCCTAATGAG |
| | gene, complete cds | |
| SEQ ID | GI 225735573 NG_011718 | GTATCAAACACACTC |
| NO: 105 | Homo sapiens alcohol | CTCTGGCTCCTAGCT |
| | dehydrogenase 1C (class 1), | CTCTCTGTTCCACTT |
| | gamma polypeptide (ADHIC), | TGTTTATCCAATTTC |
| | RefSeqGene on chromosome [symbol] | |
| SEQ ID | GI 359338962 NG_031836 | ATTTAACCTGTGCAA |
| NO: 106 | Homo sapiens Z-DNA binding | CAATCCCACAAGGTA |
| | protein 1 (ZBP1), RefSeqGene | AGTACTTCTATGACC |
| | on chromosome 20 | CCCTTTACAAAGACA |
| SEQ ID | GI 28932927 AY245248 | CTTTGAACTAGGCCA |
| NO: 107 | Homo sapiens BCL2-interacting | TTAGATTTCCGTGCC |
| | killer (apoptosis-inducing) | ACAGTCATCGTCATT |
| | (BIK) gene, complete cds | ATCGTCATCTACATC |
| SEQ ID | GI 1028908919 NG_050629 | GATTCTATATTGCAG |
| NO: 108 | Homo sapiens neurotrophin 3 (NTF3), | GACCACCAACTTGGA |
| | RefSeqGene on chromosome 12 | ATTTCAGCTCAGTTC |
| | | AGCAAACACTTTTGA |
| SEQ ID | GI 33946335 NM_002166 | TCAAGTGTGTTTATT |
| NO: 109 | Homo sapiens inhibitor of DNA | GAATGGTGATTGCCT |
| | binding 2, HLH protein (ID2), mRNA | GCTTTATTTCAGAGG |
| | | ACCAGTGCTTTGATT |
| SEQ ID | GI 315434256 NM_001926 | ATGACCTAGAAGGAA |
| NO: 110 | Homo sapiens defensin alpha 6 | ACTGTCGTGTGTCCT |
| | (DEFA6), mRNA | ATACATTGCCATCAA |
| | | CTTTGTTTCCTCATC |
| SEQ ID | GI 326537295 NG_028240 | GGCATTGAACAAAGC |
| NO: 111 | Homo sapiens cell division cycle 6 | TAAAAACTCCAGTGA |
| | (CDC6), RefSeqGene on chromosome 17 | TGCCAAACTAGAACC |
| | | AACAAATGTCCAAAC |
| SEQ ID | GI 117606551 EF064750 | CACAATTTGAGAAGC |
| NO: 112 | Homo sapiens CD80 molecule (CD80) | AAGGAATTAAGCTCT |
| | gene, complete cds | CATTTGGCTAGAGTG |
| | | ACCAGGTATCCTCTT |
| SEQ ID | GI 1064244211 NG_051562 | GAGATTCCTATTTTG |
| NO: 113 | Homo sapiens ChaC glutathione | AGGGTCAAGGTTGAA |
| | specific gamma- | CTTGTGTTACACAGG |
| | glutamylcyclotransferase 1 | ACATGGGATATAGCC |
| | (CHAC1), RefSeqGene on chro [symbol] | |
| SEQ ID | GI 33413399 NM_001984 | CCTGATAACTTCATA |
| NO: 114 | Homo sapiens esterase D (ESD), | GCTGCCTGTACAGAA |
| | mRNA | AAGAAAATCCCCGTT |
| | | GTTTTTCGATTGCAA |
| SEQ ID | GI 389565481 NM_002054 | TAGAAGAACTGGTAG |
| NO: 115 | Homo sapiens glucagon (GCG), | CCACAGTGGTGAAAT |
| | mRNA | TGGAAAGAGAACTTT |
| | | CTTCCTGAAACCTTT |
| SEQ ID | GI 296080750 NM_002704 | GGCAGGTGATGAATC |
| NO: 116 | Homo sapiens pro-platelet basic | TGCTGATTAATTTGT |
| | protein (PPBP), mRNA | TCTGTTTCTGCCAAA |
| | | CTTCTTTAACTCCCA |
| SEQ ID | GI 32187524 AY324387 | ATCCTAGGCAAGCAA |
| NO: 117 | Homo sapiens glutathione S-transferase | TGACACTACTGTATT |
| | pi (GSTP1) gene, complete cds | AGGATTCTCCAGAGA |
| | | AGCTAAGCCAGTAAG |
| SEQ ID | GI 685844874 NM_002988 | TTATCATCCTTTCCC |
| NO: 118 | Homo sapiens C-C motif chemokine | CTTTCCCTTCAACTC |
| | ligand 18 (CCL18), mRNA | TTCGTACATTCAATG |
| | | CATGGATCAATCAGT |
| SEQ ID | GI 224809244 NG_011449 | GGTAACTCCTCCTTA |
| NO: 119 | Homo sapiens 3-hydroxy-3- | CTCGATACTTCATCA |
| | methylglutaryl-CoA reductase (HMGCR), | GTACTGGTGACACAG |
| | RefSeqGene on chromosome 5 | GAACCTGAAATTGAA |
| SEQ ID | GI 293597503 NG_016969 | CTGTTAGCCAAAGAT |
| NO: 120 | Homo sapiens solute carrier family | CCAGGAATCCTTCTT |
| | 6 member 2 (SLC6A2), RefSeqGene on | TCAACACAAGATCTT |
| | chromosome 16 | AGGCAGCTGAAGTAA |
| SEQ ID | GI 387849236 NM_002613 | AACTCCTTTGAACTG |
| NO: 121 | Homo sapiens 3-phosphoinositide | GACTTACAGTTTTCC |
| | dependent protein kinase 1 (PDPK1), | GAAGATGAGAAGAGG |
| | transcript variant 1, mRNA | TTGTTGTTGGAGAAG |
| SEQ ID | GI 1403722 U60524 Human aryl | TGCACTGCTACATTG |
| NO: 122 | hydrocarbon receptor (AhR) gene, | TGGGATTTATTTCTG |
| | 3′ end of exon 11 and 3′ flanking | GATGATGTGCACATC |
| | region | TAAGGATATGGATGT |
| SEQ ID | GI 1168720186 NG_053029 | ATAACTGGTTTTTCA |
| NO: 123 | Homo sapiens solute carrier family | TCCTGGACATCTGAT |
| | 27 member 3 (SLC27A3), RefSeqGene | CTCTGTGATCCAAAG |
| | on chromosome 1 | CTTCTGAACCTCAAC |
| SEQ ID | GI 166706902 NM_002053 | AAAAATGTTGCAGGA |
| NO: 124 | Homo sapiens guanylate binding | AATGCAAAGAAAGAA |
| | protein 1 (GBP1), mRNA | TGAGCAGATGATGGA |
| | | ACAGAAGGAGAGGAG |
| SEQ ID | ref\|NG_033066.2\| | TTTTAACACCCTTAT |
| NO: 125 | Homo sapiens C-C motif chemokine | GAACTAGGGACTGTT |
| | ligand 4 (CCL4), RefSeqGene | GCACCGAGTTTCACA |
| | | GTTAAGGAAACAGAG |
| SEQ ID | GI 237858685 NG_012086 | CAGGATTCTTGTGTG |
| NO: 126 | Homo sapiens interleukin 4 receptor | GATTCGGTGAGGTAA |
| | (IL4R), RefSeqGene on chromosome 16 | TACTTCTAAAGCACC |
| | | TAGCAAAGTGTCAAG |
| SEQ ID | GI 83699682 DQ314888 | GAATGTTGTTCTCCC |
| NO: 127 | Homo sapiens v-rel reticuloendotheliosis | AGAAAAATGCATAGT |
| | viral oncogene homolog (avian) (REL) | TCACTCTTACATCCT |
| | gene, complete cds | TCAGGTGTCACTCCA |
| SEQ ID | GI 1159261125 NM_001349413 | GTATTTTCAGAGAGG |
| NO: 128 | Homo sapiens kelch like family member | AGAGCTTGGTGTTTT |
| | 24 (KLHL24), transcript variant 1, mRNA | TGTGGTGCCAAGTGG |
| | | TAAGATAATGTCTCT |
| SEQ ID | GI 307775406 NM_015364 | CTGTTTTCTTCCATA |
| NO: 129 | Homo sapiens lymphocyte antigen 96 | TTTACTGAAGCTCAG |
| | (LY96), transcript variant 1, mRNA | AAGCAGTATTGGGTC |
| | | TGCAACTCATCCGAT |
| SEQ ID | GI 375151559 NM_005651 | TTTTCCATTCTGGAG |
| NO: 130 | Homo sapiens tryptophan 2,3-dioxygenase | ACGATGACAGCCTTG |
| | (TDO2), mRNA | GACTTCAATGACTTC |
| | | AGAGAGTACTTATCT |
| SEQ ID | GI 299758475 NM_001190737 | AGCAGAATCTTGGAT |
| NO: 131 | Homo sapiens nuclear factor 1 B (NFIB), | TTGTGACTTGTAGCT |
| | transcript variant 1, mRNA | TCATAAGGACTCAAC |
| | | GAAAGAGATTGCACA |
| SEQ ID | GI 18141132 AF424815 | TTGGACTTAGATCAT |
| NO: 132 | Homo sapiens SH2 domain containing SOCS | TCCTGTGGGCATCGA |
| | box protein SOCS4 mRNA, complete cds | TTTTTAGGCCGATCT |
| | | CTTAAACAGAAACTG |
| SEQ ID | GI 323098322 NM_005624 | TGGTCAGTTCAAGGA |
| NO: 133 | Homo sapiens C-C motif chemokine ligand | TGCCCCTCCCAGGCT |
| | 25 (CCL25), transcript variant 1, mRNA | ATGCTTTTCTATAAC |
| | | TTTTAAATAAACCTT |
| SEQ ID | GI 401709987 NG_032900 | ATAATCTACGGACAT |
| NO: 134 | Homo sapiens prostaglandin-endoperoxide | CTTTGAGCCTCATTT |
| | synthase 1 (PTGS1), RefSeqGene on | TCCTCTTTGCACAAT |
| | chromosome 9 | GGGGATCATGATACC |
| SEQ ID | GI 429535871 NG_033022 | ATGGGTGTGAATATA |
| NO: 135 | Homo sapiens interleukin 12A (IL12A), | CTTAATCTGGTCAAG |
| | RefSeqGene on chromosome 3 | GAATGCCAGAATACC |
| | | CTTCAAAACAGCCAT |
| SEQ ID | GI 1036029829 AH003667 | CTGTGGGAACTTTAA |
| NO: 136 | Homo sapiens chromosome 1 leptin receptor | CTTTTGGGCTTTATT |
| | (LEPR) gene, complete cds | TTTCACAGCTCTCGT |
| | | GGCATTATCCTTCAG |
| SEQ ID | GI 315365058 HQ38416O | GTGCTCACATTTTAT |
| NO: 137 | Homo sapiens fatty acid binding protein 4, | ACCCGCTCTGTCTTA |
| | adipocyte (FABP4) gene, complete cds | GTGCGTTGCAAGAGA |
| | | GGAGTATATACAGTA |
| SEQ ID | GI 269954682 NG_015989 | CATGCACCACATCCT |
| NO: 138 | Homo sapiens C-C motif chemokine ligand | CACTAACGTTTGATG |
| | 26 (CCL26), RefSeqGene on chromosome 7 | TTTTCTGTCTTTTTC |
| | | CATTGTAGCCATCTG |
| SEQ ID | GI 432134281 NG_033037 | TTCTCCTTCCTCTTC |
| NO: 139 | Homo sapiens ancient ubiquitous protein 1 | TAGTTCCTGGCCATT |
| | (AUP1); and HtrA serine peptidase 2 | TTCTATCCAAGATGT |
| | (HTRA2), RefSeqGene on c [symbol] | GGTACAACCTCTTAC |
| SEQ ID | GI 239787846 NG_012306 | GTCATTGGAGGTGGG |
| NO: 140 | Homo sapiens interferon regulatory | TTGAGTTGGTTGATG |
| | factor 5 (IRF5), RefSeqGene on chromosome 7 | GGATTTCTCTAAAGA |
| | | TATTGAGAAACTGCT |
| SEQ ID | GI 225703119 NG_011705 | GATATCTGCACGGAT |
| NO: 141 | Homo sapiens tyrosinase related protein 1 | GACTTGATGGGATCC |
| | (TYRP1), RefSeqGene on chromosome 9 | AGAAGCAACTTTGAT |
| | | TCCACTCTAATAAGC |
| SEQ ID | GI 1036032792 AH002827 | AGGCTTGAGGTAGAG |
| NO: 142 | Homo sapiens hemopexin (HPX) gene, | ACTGGGACAAGCATA |
| | complete cds | TCCAACTCTGTATTT |
| | | ATTACCATCCTTTGT |
| SEQ ID | GI 206725542 NG_008631 | TTCCTCACAGGGTTG |
| NO: 143 | Homo sapiens patatin like phospholipase | ATATGAGGATGAAAC |
| | domain containing 3 (PNPLA3), RefSeqGene | AAGATGATAGATCAT |
| | on chromosome 22 | GGTGGCATGTAGTCT |
| SEQ ID | GI 1027250680 NG_047105 | CCTAGAGAATCATCT |
| NO: 144 | Homo sapiens slit guidance ligand 2 | CAAAGTCAAAGCTAT |
| | (SLIT2), RefSeqGene on chromosome 4 | GTCCAGAAGCAGGTC |
| | | AGGTTTCAGTATCCT |
| SEQ ID | GI 28178835 NM_005530 | AAGAATTGAGGCTGC |
| NO: 145 | Homo sapiens isocitrate dehydrogenase 3 | GTGTTTTGCTACAAT |
| | (NAD(+)) alpha (IDH3A), mRNA | TAAGGACGGAAAGAG |
| | | CTTGACAAAAGATTT |
| SEQ ID | GI 238018066 NG_012196 | CTTTAAACTGTTGTG |
| NO: 146 | Homo sapiens fibronectin 1 (FN1), | CCAGTGCTTAGGCTT |
| | RefSeqGene on chromosome 2 | TGGAAGTGGTCATTT |
| | | CAGATGTGATTCATC |
| SEQ ID | GI 269954730 NG_016009 | TCTCTCTCCCAAAAT |
| NO: 147 | Homo sapiens kininogen 1 (KNG1), | AAACTACTCCCTCTT |
| | RefSeqGene on chromosome 3 | TGGTGAAACAACTGA |
| | | AATCAGGAGGACAGA |
| SEQ ID | GI 1057867548 NM_020661 | AATATTTGGGAGAGA |
| NO: 148 | Homo sapiens activation induced | AGGATGGGGAAGCAT |
| | cytidine deaminase (AICDA), | TGCAAGGAAATTGTG |
| | transcript variant 1, mRNA | CTTTATCCAACAAAA |
| SEQ ID | GI 307611978 NM_005409 | AAGCTACCTTAAGAA |
| NO: 149 | Homo sapiens C-X-C motif | AGGCTGGTTACCATC |
| | chemokine ligand 11 (CXCL11), | GGAGTTTACAAAGTG |
| | transcript variant 1, mRNA | CTTTCACGTTCTTAC |
| SEQ ID | GI 46361513 AY594694 | ATGGGACATTTTTGC |
| NO: 150 | Homo sapiens interferon gamma | TACATAACCAGAGAT |
| | receptor 1 (IFNGR1) gene, | GTGCCAGTCCCTTTC |
| | complete cds | CTGGTATAAAAAGAG |
| SEQ ID | GI 747811824 NM_017594 | CAAGCAGGATTGTTC |
| NO: 151 | Homo sapiens DIRAS family GTPase 2 | TGTTCTAAAAAGCTG |
| | (DIRAS2), mRNA | TTGCACAGCATTCGC |
| | | AATGAGATCTTTAGT |
| SEQ ID | GI 1049010774 AH002843 | ACACTTCACAAACTG |
| NO: 152 | Homo sapiens interleukin 2 receptor | AGTGAATCCCAGCTA |
| | gamma chain (IL2RG) gene, complete cds | GAACTGAACTGGAAC |
| | | AACAGATTCTTGAAC |
| SEQ ID | GI 344313160 NG_029811 | CATGAACAAATCTCT |
| NO: 153 | Homo sapiens carbohydrate | TAACTTCTCTGAGCC |
| | sulfotransferase 1 (CHST1), | TCAGTCCCTCACCTG |
| | RefSeqGene on chromosome 11 | TGAAATTGATTCAGC |
| SEQ ID | GI 11342663 NM_002463 | AAAGACTTACCACTG |
| NO: 154 | Homo sapiens MX dynamin like | AACTCATCATGCATA |
| | GTPase 2 (MX2), mRNA | TCCAAAAATCGCTCC |
| | | CGTTGTTAGAAGGAC |
| SEQ ID | GI 27501939 AY208161 | TGAATCTTTTTGCCA |
| NO: 155 | Homo sapiens transforming growth | GCATTACATCCTGTG |
| | factor, beta 3 (TGFB3) gene, | GCTTTTTGAATTTGT |
| | complete cds | GGCCTTTTGAATCAC |
| SEQ ID | GI 209870107 NG_008768 | TGCTACTGTTGTAGA |
| NO: 156 | Homo sapiens propionyl-CoA | GAAGGGTAGGCCAGA |
| | carboxylase alpha subunit (PCCA), | GAATTTCTTTATGAG |
| | RefSeqGene on chromosome 13 | CAGCTCTTAGAAAGG |
| SEQ ID | GI 671744853 NG_034216 | AGGAATTCACACAGC |
| NO: 157 | Homo sapiens vascular endothelial | TAATCAATTCCATAA |
| | growth factor C (VEGFC), RefSeqGene | GGTGCAGTTGCTGGC |
| | on chromosome 4 | TTCTCTCTTCTTAAG |
| SEQ ID | GI 84043962 NM_015904 | CAGGGAAGACAAAAA |
| NO: 158 | Homo sapiens eukaryotic translation | TTCTAGATAAGCTCC |
| | initiation factor 5B (EIF5B), mRNA | GTCACACACATGTAC |
| | | AAGATGGTGAAGCAG |
| SEQ ID | GI 172072641 NM_005373 | TATCTGTCCCCTGCT |
| NO: 159 | Homo sapiens MPL proto-oncogene, | ACTAGATTGTGAGCT |
| | thrombopoietin receptor (MPL), mRNA | CCTTGAGGGAAAGGA |
| | | ACATGATTTATTTGT |
| SEQ ID | GI 15128210 AF402002 | GGTAAACTGGAATGA |
| NO: 160 | Homo sapiens interleukin 20 (IL20) | CCCACATCAATGGAA |
| | gene, complete cds | ACTAGTAAAGCGAGG |
| | | ATTTATTTGGACCCA |
| SEQ ID | GI 190570161 NG_008053 | CATGAGAGATCAGAG |
| NO: 161 | Homo sapiens acyl-CoA synthetase | GGCAGAAAGATAGAG |
| | long chain family member 4 (ACSL4), | AGTCTGCACACTTAT |
| | RefSeqGene on chromosome X | TACCTTTGCTCCTTT |
| SEQ ID | GI 343098512 NG_029658 | TAGAAGAAGAGCTGG |
| NO: 162 | Homo sapiens BTB domain and CNC | TAAAAAAGATAGAAC |
| | homolog 1 (BACH1), RefSeqGene on | CACAGACGATCCCCA |
| | chromosome 21 | GGTTCCTTTCTTGAA |
| SEQ ID | GI 1024846757 NG_047018 | GCTTAATGCTATGTC |
| NO: 163 | Homo sapiens histone deacetylase 1 | CAGAGATGATTTGCC |
| | (HDAC1), RefSeqGene on chromosome 1 | AGTGAAGCTAGATTT |
| | | GCCAGTGAAGAGAAT |
| SEQ ID | GI 341572559 NG_029522 | CAAAACCAGAATCTG |
| NO: 164 | Homo sapiens tachykinin receptor 1 | AACTGAGGGAGTCTG |
| | (TACR1), RefSeqGene on chromosome 2 | TCTTTGGAGCTCACT |
| | | CATTAGCTACTACAT |
| SEQ ID | GI 210032511 NG_008871 | CCTCTTACTTGTTCT |
| NO: 165 | Homo sapiens xanthine dehydrogenase | GTCTTTCTCTCTCTC |
| | (XDH), RefSeqGene on chromosome 2 | GCTTTAAAGGTGTCG |
| | | CTGCATTTTGGTAAC |
| SEQ ID | GI 430727969 NG_033033 | CTCTTTCCACTTAGC |
| NO: 166 | Homo sapiens ISG15 ubiquitin-like | ATAACGTTTTCAAGG |
| | modifier (ISG15), RefSeqGene on | TTCTTTCACATGAAT |
| | chromosome 1 | CAGTGCCTCAGTCCT |
| SEQ ID | GI 223890186 NG_009797 | GAAGGCAAGCACAGA |
| NO: 167 | Homo sapiens junctophilin 3 (JPH3), | TAAGTTGATCGTGGC |
| | RefSeqGene on chromosome 16 | TCAGTTCTTTGAAGG |
| | | AGATTAATAGGCTTT |
| SEQ ID | GI 1039673930 NG_050913 | CACAGATGGTGTTAT |
| NO: 168 | Homo sapiens nuclear receptor | TTCCTGTGTTAGACT |
| | subfamily 5 group A member 2 (NR5A2), | TCCTACTTACTGATA |
| | RefSeqGene on chromosome 1 | GCTGGGCTCACACTT |
| SEQ ID | GI 1073857156 NM_016930 | CAGATATTCATGAGG |
| NO: 169 | Homo sapiens syntaxin 18 (STX18), | ACCTGTTCAGAAGCA |
| | transcript variant 1, mRNA | ATTCAGCAACTACGA |
| | | ACAGAAGCTCACAAG |
| SEQ ID | GI 67515430 DQ088982 | GGGATTCTGCATCTC |
| NO: 170 | Homo sapiens glutathione peroxidase 6 | ATTTCACAGAGTGAC |
| | (olfactory) (GPX6) gene, complete cds | ATCCTCATGAGAACC |
| | | AAATCTTTGGAAGTT |
| SEQ ID | ref\|NG_021140.1\| | CTGAGCCACTGGATT |
| NO: 171 | Homo sapiens adiponectin, CIQ and collagen | TTCTCACCCTCAGAA |
| | domain containing | CTGTGAGCCAACAAA |
| | | TTTCTGTTCTTTATA |
| SEQ ID | GI 315506987 NG_028041 | GTTGCCAGGAGATTT |
| NO: 172 | Homo sapiens adenylate kinase 3 (AK3), | CACAGACTGGCAGTT |
| | RefSeqGene on chromosome 9 | ACTCATTTGTAATCA |
| | | ACAACCTTTTGCAAA |
| SEQ ID | GI 916259104 NG_042801 | TTAATCCCACTTTTA |
| NO: 173 | Homo sapiens bromodomain containing 2 | GGGTTGCCGAGGATT |
| | (BRD2), RefSeqGene on chromosome 6 | TTTCGAACGAGCAGA |
| | | AATGTATTGGTAACT |
| SEQ ID | GI 1140392578 NG_052831 | ATATTTATGGCTTTG |
| NO: 174 | Homo sapiens glutamate metabotropic | TTGAGTTTCCTTCCT |
| | receptor 5 (GRM5), RefSeqGene on | GTAGGGCTGTCTGTG |
| | chromosome 11 | TTCCTTTCACAAACT |
| SEQ ID | GI 261245113 NG_013061 | TTGACGTCATGAAAT |
| NO: 175 | Homo sapiens 3-hydroxymethyl-3-methylglutaryl- | TCAATGGCTCATCGC |
| | CoA lyase (HMGCL), RefSeqGene on chromosome 1 | CTTAGTCTCTAAGAA |
| | | AGCTTGTTGGCTAAA |
| SEQ ID | GI 90657247 DQ449938 | CTGCCAAATACAATT |
| NO: 176 | Homo sapiens Fas (TNFRSF6)-associated via | TTCGCAGTAGCCCTG |
| | death domain (FADD) gene, complete cds | TGGCTTAGATACTGT |
| | | TAGCTATCACTGTTC |
| SEQ ID | GI 440503012 JX512452 | TAATGATTACTGTCA |
| NO: 177 | Homo sapiens mitogen-activated protein | CGATGTGTGTGGTAC |
| | kinase 14 (MAPK14) gene, complete cds | AGTTTGACAAACCTG |
| | | GGTCCATATAGACCA |
| SEQ ID | GI 1025812271 NG_047045 | TGATTTATTCCATAT |
| NO: 178 | Homo sapiens activating transcription | CCCATCCCATTGTGT |
| | factor 2 (ATF2), RefSeqGene on chromosome 2 | CTCTGACCTCATCTG |
| | | CCACATTGTTTTGTC |
| SEQ ID | GI 821325145 NG_029706 | ATGGGCACTTGATCC |
| NO: 179 | Homo sapiens SH2B adaptor protein 1 | AATCAGCTACTCAGT |
| | (SH2B1), RefSeqGene on chromosome 16 | TCTGGAAATTTCATT |
| | | GGGAATCTCAGAAAA |
| SEQ ID | GI 254939589 NG_012569 | TAGTGGGTGGGAGAA |
| NO: 180 | Homo sapiens toll like receptor 7 (TLR7), | TTCCTTATTGCAATC |
| | RefSeqGene on chromosome X | ACACTCTACTTCTCC |
| | | ATCCAGAAAACTCTC |
| SEQ ID | GI 149274622 NM_032579 | AGAACTCAGTTTTGT |
| NO: 181 | Homo sapiens resistin like beta (RETNLB), | GACCATGACAGTAAT |
| | mRNA | GAAACCAGGGTCCCA |
| | | ACCAAGAAATCTAAC |
| SEQ ID | GI 238776831 NG_012261 | GAAGATAAGTCTCCA |
| NO: 182 | Homo sapiens aldehyde dehydrogenase 8 family | TTTGCCTTTTCGCAG |
| | member A1 (ALDH8A1), RefSeqGene on chromosome 6 | GGTTGCTTTTTGTTT |
| | | TTCTTTCTACCTGCT |
| SEQ ID | GI 38327038 NM_002154 | TATACTGATGCAGAA |
| NO: 183 | Homo sapiens heat shock protein family A | AGACGATCAGTGATG |
| | (Hsp70) member 4 (HSPA4), mRNA | GATGCAACACAGATT |
| | | GCTGGTCTTAATTGC |
| SEQ ID | GI 219555683 NM_176891 | TAGCCAACACAATAG |
| NO: 184 | Homo sapiens interferon epsilon (IFNE), mRNA | GGAAATGGAGAAAAT |
| | | GTACTCTGAACACCA |
| | | TGAAAAGGGAACCTG |
| SEQ ID | GI 633257761 NM_001143836 | ATGATGTTTCAAAGC |
| NO: 185 | Homo sapiens NADPH oxidase 4 (NOX4), | TGGTCTGCCATTCTA |
| | transcript variant NOX4B, mRNA | GATGAGCCTCCTTGC |
| | | TTATTTAAGTTCCAG |
| SEQ ID | GI 966209818 NM_014031 | CTGTTCCCTTACTTT |
| NO: 186 | Homo sapiens solute carrier family 27 member 6 | TGGGATGACTTCTGG |
| | (SLC27A6), transcript variant 1, mRNA | TTCGTGTTGAAGGTG |
| | | GTGCTCATTATAATT |
| SEQ ID | GI 152112977 EU012027 | TTTGTTTTGTTTGCT |
| NO: 187 | Homo sapiens high-mobility group box 1 | TGGCATAGCCCCTTC |
| | (HMGB1) gene, complete cds | AAGGAATTTAATCTC |
| | | TCGGCCATATTCTTG |
| SEQ ID | GI 342672042 NG_029626 | GGATTTTTAAGGGGT |
| NO: 188 | Homo sapiens synaptosome associated protein | AACCTGAGTTCTGTT |
| | 25 (SNAP25), RefSeqGene on chromosome 20 | TCTTTTCCCCCTTTT |
| | | CTAGGCTGATTCCAA |
| SEQ ID | GI 1024336756 NG_046908 | CTTTCTGACCTACTA |
| NO: 189 | Homo sapiens YY1 transcription factor (YY1), | CCTTTCCTCAAAGCT |
| | RefSeqGene on chromosome 14 | TTCAATCCTTTTGGG |
| | | CTTTCTCCACTTGAA |
| SEQ ID | GI 293629222 NG_017001 | ATTCTTTCAAGTCTG |
| NO: 190 | Homo sapiens hepatitis A virus cellular | AACAGGCCTCTTAGA |
| | receptor 1 (HAVCR1), RefSeqGene on | GTCTCTGCTCCTTGG |
| | chromosome 5 | AAGTGTAGAATTGAC |
| SEQ ID | GI 1024846756 NG_047011 | TTTTCCAGCATCTAG |
| NO: 191 | Homo sapiens mannose receptor C-type 1 | AGCTACATTCTATGA |
| | (MRC1), RefSeqGene on chromosome 10 | ACTCATCAGCTCATG |
| | | ACCCATTCCTCCTTC |
| SEQ ID | GI 908212430 NM_000412 | TATGATGTAGAAGCC |
| NO: 192 | Homo sapiens histidine rich glycoprotein | TTGGACTTGGAAAGC |
| | (HRG), mRNA | CCGAAAAACCTTGTC |
| | | ATAAACTGTGAAGTC |
| SEQ ID | GI 146045339 EF543149 | GCTCCAGTATTTATG |
| NO: 193 | Homo sapiens prostaglandin E synthase | TTGCCACTCTGTTGA |
| | (PTGES) gene, complete cds | ATGTACAGCCCATAA |
| | | CTTCCCTAACCAATT |
| SEQ ID | GI 308210781 NG_027799 | CTGTTGCAAGTCTTA |
| NO: 194 | Homo sapiens interferon related | AGTGGGGAATGAACT |
| | developmental regulator 1 (IFRD1), | TTGTGTTTTTAAGTT |
| | RefSeqGene on chromosome 7 | GGCAAAGACCAGTGT |
| SEQ ID | GI 345525590 NG_029936 | TTACATGCGCCATCT |
| NO: 195 | Homo sapiens mitogen-activated protein | CATCTAGTCTTCACA |
| | kinase 3 (MAPK3), RefSeqGene on | ACCACCCTCAAAAGA |
| | chromosome 16 | ACCATTATTTCATGG |
| SEQ ID | GI 256985185 NG_012797 | CHROMOSCTTTCCCT |
| NO: 196 | Homo sapiens membrane bound transcription | TAGCACTGCTAGATT |
| | factor peptidase, site 2 (MBTPS2), RefSeqGene on | GCCCTCCAAAAATGT |
| | chromoso [symbol] | CTTTTTGTAACTGAC |
| | | CCTCTTAC |
| SEQ ID | GI 254911084 NG_012516 | GTATAGGCCGGTCTA |
| NO: 197 | Homo sapiens moesin (MSN), RefSeqGene | AAGTGAGCTCTATGG |
| | on chromosome X | GCAGATCTACCCCTT |
| | | ACTTATTATTCCAGA |
| SEQ ID | GI 654825051 NG_029042 | TCAGTGCATAGAGAG |
| NO: 198 | Homo sapiens prolactin receptor (PRLR), | AAGGAGATAGTCAAA |
| | RefSeqGene on chromosome 5 | GAACCACTGTGGGGC |
| | | AGAAAAGGAAAATAT |
| SEQ ID | GI 189339276 NM_001204 | CCGGAAAAAGAAAGG |
| NO: 199 | Homo sapiens bone morphogenetic protein | CTAGAAAATACTCGC |
| | receptor type 2 (BMPR2), mRNA | ACTTCCTCAGAACCC |
| | | TCTTTCTTGTTAACG |
| SEQ ID | GI 378404896 NM_001256796 | ATTTATGATGCTAAA |
| NO: 200 | Homo sapiens purinergic receptor P2X 4 | ACAGATCCCTTCTGC |
| | (P2RX4), transcript variant 1, mRNA | CCCATATTCCGTCTT |
| | | GGCAAAATAGTGGAG |
| SEQ ID | GI 37577125 NM_194315 | AGGCTCCTAGGTTTA |
| NO: 201 | Homo sapiens ubiquitin conjugating enzyme | GCTTTTAAAAACCTG |
| | E2 J2 (UBE2J2), transcript variant 1, mRNA | AAAGGGGAAGCAAAA |
| | | ACCAAAATGTGTGAC |
| SEQ ID | GI 312434026 NM_002995 | AAATAATCCAGTCTT |
| NO: 202 | Homo sapiens X-C motif chemokine ligand 1 | CACTGGGTTCCCATT |
| | (XCL1), mRNA | CTGAGGGTCCACTAC |
| | | TCAAAAATTTGCTTC |
| SEQ ID | GI 325053739 NG_028167 | CCTGTAGTTCTAGTT |
| NO: 203 | Homo sapiens growth differentiation factor 3 | ACTTGGAGGCTGAGG |
| | (GDF3), RefSeqGene on chromosome 12 | CAGAAGATTCCCTTG |
| | | ATCCAGTAATTCAAG |
| SEQ ID | GI 169791020 NM_005328 | CAATGTGGTTTCACA |
| NO: 204 | Homo sapiens hyaluronan synthase 2 | AACATCACTTGTGGA |
| | (HAS2), mRNA | TGACCTACGAAGCGA |
| | | TTATCACTGGATTCT |
| SEQ ID | GI 3169541 AF043105 | GGTGATCTCATCTAG |
| NO: 205 | Homo sapiens glutathione S-transferase mu 3 | TCTCTGGTTTCAAAC |
| | (GSTM3) gene, complete cds | ACAGAGTGATCACTC |
| | | CTGTACTTGCTGTTT |
| SEQ ID | GI 324021724 NG_028154 | CTAAAGCTTCGCATA |
| NO: 206 | Homo sapiens fatty acid binding protein 5 | AATGATCTTTAGGGC |
| | (FABP5), RefSeqGene on chromosome 8 | AGACGTTAAAGGGCT |
| | | GGTACAACTACAACC |
| SEQ ID | GI 238814313 NG_012262 | TCTAGCTTACTTGTA |
| NO: 207 | Homo sapiens topoisomerase | CCAGTCACACTAGCC |
| | (DNA) 1 | TCCTTTGTTTCTTTT |
| | (TOP1), RefSeqGene on chromosome 20 | CCACACCAGATTCTT |
| SEQ ID | GI 260656026 NM_005518 | CGACCCTTCACCCTT |
| NO: 208 | Homo sapiens 3-hydroxy-3- | GACGATTTACAGTAC |
| | methylglutaryl-CoA synthase 2 | ATGATCTTTCATACA |
| | (HMGCS2), transcript variant 1, mRNA | CCCTTTTGCAAGATG |
| SEQ ID | GI 117606555 EF064752 | AACCAGGGGGAAGGT |
| NO: 209 | Homo sapiens CD5 molecule | GAGGGACTGTGGAAT |
| | (CD5) gene, complete cds | CTAACTTCCTTACTT |
| | | TACAGATTAAGAAAC |
| SEQ ID | GI 223972691 NG_009823 | AATCGCTCCTCTGGA |
| NO: 210 | Homo sapiens crystallin alpha A | ATTGTAACCTTGCAG |
| | (CRYAA), RefSeqGene on chromosome 21 | GGCAAAAGCTATCAT |
| | | TTCAAGATTTTTTGG |
| SEQ ID | GI 212549770 NG_008989 | GGATTCATGTTGCAG |
| NO: 211 | Homo sapiens matrix metallopeptidase 2 | ATATTGGTGATAGTG |
| | (MMP2), RefSeqGene on chromosome 16 | TGACATGAAGGCAGG |
| | | ATTGTGGTTAAGAGG |
| SEQ ID | GI 38202233 NM_052864 | GAATGAAGGCTGCAG |
| NO: 212 | Homo sapiens TRAP interacting protein | ATGGAAGTAAAATAG |
| | with forkhead associated domain | ATTATGCTGGATTAT |
| | (UFA), mRNA | CTGGGTGTGCCCAAT |
| SEQ ID | GI 148733545 EF636667 | ATCACACTGTGTTGC |
| NO: 213 | Homo sapiens caspase 4, apoptosis- | AACATCTGTACCTGA |
| | related cysteine peptidase | TGTTGCAAGACTAAC |
| | (CASP4) gene, complete cds | ATTTTTGCTACCTCT |
| SEQ ID | GI 54781374 AY795972 | ATGTTGCAGAATACT |
| NO: 214 | Homo sapiens matrix metalloproteinase 7 | CACTATTTCCAAATA |
| | (matrilysin, uterine) | GCCCAAAATGGACTT |
| | (MMP7) gene, complete cds | CCAAAGTGGTCACCT |
| SEQ ID | GI 915408 U30245 Human | AAAGCTTTACGGACA |
| NO: 215 | myelomonocytic specific protein | GTGATTCTGTCCTAA |
| | (MNDA) gene, 5′ flanking | ACAAGACAGTGACTC |
| | sequence and complete exon 1 | CAGGATTTCTGAAGA |
| SEQ ID | GI 335334987 NG_029076 | CTAGAAGCCTACAGC |
| NO: 216 | Homo sapiens C-X-C | CTTGGTTATTCCAGT |
| | motif chemokine receptor 3 | TCATCTTTTTAACAA |
| | (CXCR3), RefSeqGene on chromosome X | CCCTGCTGAGGAAAC |
| SEQ ID | GI 90577165 NM_032587 | AAGGAGGATTTGCTG |
| NO: 217 | Homo sapiens caspase recruitment | GCTGGAGTGGAGAAT |
| | domain family member 6 | TTGGAAATTCGAGAC |
| | (CARD6), mRNA | ATACAAACCATTAAT |
| SEQ ID | GI 217416377 NM_138394 | GATAATAATCTGGGA |
| NO: 218 | Homo sapiens heterogeneous nuclear | TCCATGGGTGGGCTT |
| | ribonucleoprotein L like | CAGAGAATCTGTGTA |
| | (HNRNPLL), transcript variant 1, mRNA | CCCCCTAAAATTGTA |
| SEQ ID | GI 187763976 EU518415 | ATCTGACTTTCACTT |
| NO: 219 | Homo sapiens serum/glucocorticoid | CTTGAAAGTGATCGG |
| | regulated kinase 1 isoform 2 | AAAGGGCAGTTTTGG |
| | (SGK1) mRNA, complete cds | AAAGGTTCTTCTAGC |
| SEQ ID | GI 1174251657 KY500414 | GGTAAGGACCTCCAA |
| NO: 220 | Homo sapiens LTB gene, complete cds | GACCTGAATAAGAGT |
| | | GTAAATAATCCGAAG |
| | | GTTCCAGTTCTGCTC |
| SEQ ID | GI 678246480 NG_034237 | CTTCACAAACCTACA |
| NO: 221 | Homo sapiens cytokine receptor like factor 2 | GGTTCTCGGAGCTCT |
| | (CRLF2), RefSeqGene on chromosome X and 7 | GGTGGAAGCTTCTCC |
| | | TATAAAAGTAATGAG |
| SEQ ID | GI 190358513 NG_008045 | TGTGTGCACATAAAT |
| NO: 222 | Homo sapiens dihydrolipoamide dehydrogenase | GCTCCTTATCTTGGT |
| | (DLD), RefSeqGene on chromosome 7 | CCCATGTCCTTCTTG |
| | | AGTTACCAATTTTGT |
| SEQ ID | GI 190358530 NG_008050 | CCATCTAAAGTCAGT |
| NO: 223 | Homo sapiens endothelin 3 | TATGGAGCTAGATGA |
| | (EDN3), RefSeqGene on chromosome 20 | GGGGCTGCCTGAATA |
| | | TTAAGGAAGAAGTGG |
| SEQ ID | GI 428673540 NM_006273 | GGACTTTATGAAGCA |
| NO: 224 | Homo sapiens C-C motif chemokine ligand 7 | CCTGGACAAGAAAAC |
| | (CCL7), mRNA | CCAAACTCCAAAGCT |
| | | TTGAACATTCATGAC |
| SEQ ID | GI 392055950 JQ867454 | CAATGTCAATAGCAG |
| NO: 225 | Homo sapiens ERBB receptor feedback inhibitor 1 | GAGTTGCTGCTCAGG |
| | (ERRFIl) gene, complete cds | AGATCAGAGTCCCAT |
| | | TAAAAACTGGATTTC |
| SEQ ID | GI 678246479 NG_034239 | TTGAGTGCTGAGCAG |
| NO: 226 | Homo sapiens lipopolysaccharide binding protein | GTAAATCCAAGAAGT |
| | (LBP), RefSeqGene on chromosome 20 | GATTTCCACAAGGTA |
| | | GAAAAAGTGGTGAAG |
| SEQ ID | GI 224809263 NG_011469 | GTTTATCTCCACAGT |
| NO: 227 | Homo sapiens microsomal | GCAGTTTTCTCAGTA |
| | triglyceride transfer protein | CCCATTCTTAGTTTG |
| | (MTTP), RefSeqGene on chromosome 4 | CATGCAGATGGACAA |
| SEQ ID | GI 974987499 NG_023044 | CACACTCTTCTTTGG |
| NO: 228 | Homo sapiens radixin | CATGTAACTTAGCAA |
| | (RDX), RefSeqGene on chromosome 11 | CTGGATCGATCAGTC |
| | | AAAGGGGAAAATGAA |
| SEQ ID | GI 344925862 NG_029825 | CACCTGCTCATCACA |
| NO: 229 | Homo sapiens ubiquitin specific peptidase 2 | TAAGTCAGAAGGGAC |
| | (USP2), RefSeqGene on chromosome 11 | AGATGTGGTCTTAAC |
| | | TCCTGAAATATCCAG |
| SEQ ID | GI 939106626 NG_029107 | CCTCTTTTATCTCTG |
| NO: 230 | Homo sapiens integrin subunit alpha 3 | CGTGTAAACCCCTAT |
| | (ITGA3), RefSeqGene on chromosome 17 | TTTGTTTTCAAGGTC |
| | | CCTGTCAGATGCTTC |
| SEQ ID | GI 41393574 NM_033214 | ACAAGCCAAAAACAC |
| NO: 231 | Homo sapiens glycerol kinase 2 | CTATGGAACAGGTTG |
| | (GK2), mRNA | CTTCTTACTGTGTAA |
| | | TACGGGTCGTAAATG |
| SEQ ID | GI 440503006 JX512449 | CCAGAAAACCTACTG |
| NO: 232 | Homo sapiens mitogen-activated protein kinase 1 | AAGACCTGAGGAATG |
| | (MAPK1) gene, complete cds | GAGGACTAGATTGAA |
| | | GAATTGGGAAGTCAC |
| SEQ ID | GI 326537295 NG_028240 | GTTTCATTCATCCTG |
| NO: 233 | Homo sapiens cell division cycle 6 | ACCACTGTATCCGTG |
| | (CDC6), RefSeqGene on chromosome 17 | TAATGTGATCTGAGC |
| | | TACAACAGGTGGTAT |
| SEQ ID | GI 397938 Z22576 H. sapiens CD69 gene | ATGTTTCTTCATGCT |
| NO: 234 | | CTGAGGACTGGGTTG |
| | | GCTACCAGAGGAAAT |
| | | GCTACTTTATTTCTA |
| SEQ ID | GI 210147537 NM_025106 | TTTAAAGATTTTCCT |
| NO: 235 | Homo sapiens splA/ryanodine receptor | CCCTCCTGTTTCAGG |
| | domain and SOCS box containing 1 | TGGGTCACATTCTGA |
| | (SPSB1), mRNA | TGAATGTTTCCCTTG |
| SEQ ID | GI 36030972 NM_181713 | GTCTGAGTTTTTAAA |
| NO: 236 | Homo sapiens UBX domain protein 2A | TAGCTAATACGACCG |
| | (UBXN2A), mRNA | GGTACAGTGGTTCAT |
| | | GCCTGTAATCCCAGA |
| SEQ ID | GI 3169541 AF043105 | TATGCTTTTGGGGCC |
| NO: 237 | Homo sapiens glutathione S-transferase mu 3 | TGGGAATTTGAGGTA |
| | (GSTM3) gene, complete cds | TTGGGACCAAGTCAT |
| | | TTCTTTAGATCTTTT |
| SEQ ID | GI 594591642 NG_034033 | GGTTAAATTAACTGT |
| NO: 238 | Homo sapiens phosphofructokinase, liver type | AGTCCTGATGGGACT |
| | (PFKL), RefSeqGene on chromosome 21 | GTCTCCATGTCTTTT |
| | | CCCTTCCCTTAACGT |
| SEQ ID | GI 270047500 NG_016132 | GAAATTCCCATGTAT |
| NO: 239 | Homo sapiens selectin L | TCTCCCAAGTATCTA |
| | (SELL), RefSeqGene on chromosome 1 | TTCACCAAGGCCACA |
| | | GCTCTAACCAAATGC |
| SEQ ID | GI 19923714 NM_138284 | TCAGAAGAATCCAAG |
| NO: 240 | Homo sapiens interleukin 17D | CAGGTATTGGCTTAG |
| | (IL17D), mRNA | TTGTAAGGGCTTTAG |
| | | GATCAGGCTGAATAT |
| SEQ ID | GI 31164 X51956 Human ENO2 | CCCGTGACCAATCTG |
| NO: 241 | gene for neuron specific | TTCTGTCTCAGATCC |
| | (gamma) enolase | TGATTAAAGTCATGG |
| | | GTTCTGAAAACTACT |
| SEQ ID | GI 184160977 NG_007553 | AAGAGTTAACAGTAG |
| NO: 242 | Homo sapiens actin, alpha, cardiac muscle 1 | TGCCCTGAGGTTAGT |
| | (ACTC1), RefSeqGene on chromosome 15 | TTCGGAGCACAATTA |
| | | TTGTTGGAGCTGATA |
| SEQ ID | GI 189339222 NG_007959 | GCCTGAAAACCAGCA |
| NO: 243 | Homo sapiens cytochrome P450 family 27 | CAGTATCATTTCCAC |
| | subfamily A member 1 | TGTATTCCACTCATC |
| | (CYP27A1), RefSeqGene on chromosome [symbol] | AAAGCAGTTACAGAG |
| SEQ ID | GI 628601932 NG_034128 | GGAAGCAAACTTCTA |
| NO: 244 | Homo sapiens guanylate cyclase 1 | GTACCCCTCCTTTCC |
| | soluble subunit alpha | TAAGCCTAGAAGCTT |
| | (GUCY1A3), RefSeqGene on chromosome 4 | ATGATGAGAAATGGG |
| SEQ ID | GI 176866166 NG_007524 | GAAACTTCAGTTGTA |
| NO: 245 | Homo sapiens KRAS proto-oncogene, GTPase | GCTGAGAGCAGGCCT |
| | (KRAS), RefSeqGene on chromosome 12 | GGAATCCCCATGCTT |
| | | ATACTTTTTATTTCC |
| SEQ ID | GI 193211405 NG_008118 | TAAGCACTTACGTGA |
| NO: 246 | Homo sapiens left-right determination factor 2 | GTAAATAATGCAGCT |
| | (LEFTY2), RefSeqGene on chromosome 1 | CAGATGCTGAGCTCT |
| | | AGTAGGAAATGCTGG |
| SEQ ID | GI 346644679 NG_029975 | TCAGAGATACAGGAA |
| NO: 247 | Homo sapiens transforming growth factor alpha | CACCAGTGAGTGTGT |
| | (TGFA), RefSeqGene on chromosome 2 | TTGCTTCAATCATCT |
| | | GGATTGTAAACTCCT |
| SEQ ID | GI 206597534 NM_001639 | CTATGAAATCAGAGG |
| NO: 248 | Homo sapiens amyloid P component, serum | ATATGTCATCATCAA |
| | (APCS), mRNA | ACCCTTGGTGTGGGT |
| | | CTGAGGTCTTGACTC |
| SEQ ID | GI 224809272 NG_011478 | AGTGTGTGAATATCA |
| NO: 249 | Homo sapiens uncoupling protein 2 | GGAAGATGACTGAAC |
| | (UCP2), RefSeqGene on chromosome 11 | GTCTTTGGGACTCCG |
| | | TTTCCTCATTGTAAA |
| SEQ ID | GI 167860125 NM_002639 | TTCTTTGGGATAGAG |
| NO: 250 | Homo sapiens serpin family B member 5 | AATGTTCCAGACATT |
| | (SERPINB5), mRNA | CTCGCTTCCCTGAAA |
| | | GACTGAAGAAAGTGT |
| SEQ ID | GI 429535873 NG_033024 | ATTGTGAAAATCAAA |
| NO: 251 | Homo sapiens colony stimulating factor 2 | CACTTGTCAGCCCCT |
| | (CSF2), RefSeqGene on chromosome 5 | CAAGAGCCTTTAGAT |
| | | TTCCTACTTCCACAC |
| SEQ ID | GI 563317866 NG_033843 | TTTTCCTTATAAGGA |
| NO: 252 | Homo sapiens DnaJ heat shock protein family | CACTAATCCCATGAT |
| | (Hsp40) member C6 | GGGGGCCCTACCCAC |
| | (DNAJC6), RefSeqGene on chromosome [symbol] | ATAACCTCATTTAAA |
| SEQ ID | GI 354725887 NG_030444 | GGGTAAAAAGCCTTA |
| NO: 253 | Homo sapiens hepatitis A virus cellular receptor 2 | AGTTCCCTTAGCTTC |
| | (HAVCR2), RefSeqGene on chromosome 5 | AGATTCCTGGGCTGT |
| | | AACATGTTGATGATG |
| SEQ ID | GI 359751452 NG_031884 | GTTAATGGGGAATGG |
| NO: 254 | Homo sapiens mitogen-activated | ATTACCATGAGGAAA |
| | protein kinase kinase kinase 1 | AATATGGGGCATTCA |
| | (MAP3K1), RefSeqGene on chromosome 5 [symbol] | GAAATGCTCTCAGGT |
| SEQ ID | GI 122937306 NM_001080454 | GCTGACTTTGAAGCC |
| NO: 255 | Homo sapiens acyl-CoA synthetase | ATAAATCGCTGTAAC |
| | medium chain family member 4 | AGGCCATTGCCTAAA |
| | (ACSM4), mRNA | AACTTTAACTTTGCT |
| SEQ ID | GI 260656026 NM_005518 | AACAGTGCTCATGGA |
| NO: 256 | Homo sapiens 3-hydroxy-3- | ACTCTTCCAGGATTC |
| | methylglutaryl-CoA synthase 2 | AGGCAATACTGATAT |
| | (HMGCS2), transcript variant 1, mRNA | TGAGGGCATAGATAC |
| SEQ ID | GI 527317415 NM_000304 | AGAAAGCAGACAAAG |
| NO: 257 | Homo sapiens peripheral myelin protein 22 | AAAAAAGAGCTAGCC |
| | (PMP22), transcript variant 1, mRNA | CAAAATCCCAAACTC |
| | | AAACCAAACCAAACA |
| SEQ ID | GI 56788327 AY851164 | AATCATCCAACTTCT |
| NO: 258 | Homo sapiens carboxylesterase 2 | ATGGGCCTCAGTTTC |
| | (intestine, liver) | AACACCCATAAAATA |
| | (CES2) gene, complete cds | GGCACAACAATCTCC |
| SEQ ID | GI 299758395 NG_011675 | ATAAAAAGCTGAGAT |
| NO: 259 | Homo sapiens glial cell | CTGGGGACAATGTGA |
| | derived neurotrophic factor | GAATCCTTAGCAGTA |
| | (GDNF), RefSeqGene on chromosome 5 | TGTTGCTGTTGTTGC |
| SEQ ID | GI 518828582 NM_001278579 | ATTACAACATCCTGC |
| NO: 260 | Homo sapiens activin A receptor type 2A | TCTATTCCTTGGTGC |
| | (ACVR2A), transcript variant 1, mRNA | CACTTATGTTAATTG |
| | | CGGGGATTGTCATTT |
| SEQ ID | GI 150010588 NM_003641 | CCTGCCCCTAGATAC |
| NO: 261 | Homo sapiens interferon induced | AGCAGTTTATACCCA |
| | transmembrane protein 1 | CACACCTGTCTACAG |
| | (IFITM1), mRNA | TGTCATTCAATAAAG |
| SEQ ID | GI 960513892 NM_001317781 | TTTGTGTTGCACGCA |
| NO: 262 | Homo sapiens sorting nexin 25 | TGCTTGAGGAACTCA |
| | (SNX25), mRNA | GATGATGAAGTAAGA |
| | | TTTCTACAAACGTGT |
| SEQ ID | GI 1049010852 AH002976 | CAGCTTTGTGTCAAT |
| NO: 263 | Homo sapiens S protein | TACCCTGGAGGTTAC |
| | (PROS1) gene, complete cds; and | ACTTGCTATTGTGAT |
| | PS-alpha gene, complete sequence | GGGAAGAAAGGATTC |
| SEQ ID | GI 194018739 NG_008192 | GCTAATCTTTCCTCC |
| NO: 264 | Homo sapiens CD36 molecule | AGGAAAGGGTTGTGA |
| | (CD36), RefSeqGene on chromosome 7 | TTTCTCCACTTTTCA |
| | | CTTCATGAACAACCA |
| SEQ ID | GI 257467496 NG_012839 | GTTGAAGTTGAGGTG |
| NO: 265 | Homo sapiens glutamate | AGAGATCTGACAGAA |
| | metabotropic receptor 1 | GAGCTGCCTCTTGCT |
| | (GRM1), RefSeqGene on chromosome 6 | AGATAGTATTTGTGC |
| SEQ ID | GI 327180724 NG_028256 | CCCCATTTTGGTGTT |
| NO: 266 | Homo sapiens mitogen- | GATATGGAAATTCCT |
| | activated protein kinase kinase 3 | AGGTCACTATGCAGA |
| | (MAP2K3), RefSeqGene on chromosome 17 | CAAGAAAACCAGGAC |
| SEQ ID | GI 1024846748 NG_046980 | TTTTGGACACCTTAG |
| NO: 267 | Homo sapiens synaptonemal complex protein 2 | CTATGTTAGTTACCA |
| | (SYCP2), RefSeqGene on chromosome 20 | GGGCAGAGGGGACTT |
| | | TGAATTATCTACTGC |
| SEQ ID | GI 1159261282 NG_052987 | CTTTGGACAGAACTA |
| NO: 268 | Homo sapiens zinc finger protein 148 | GCCAAAATGATGCCT |
| | (ZNF148), RefSeqGene on chromosome 3 | ATTTGAATAGCCCGA |
| | | GCCTTAACTTTGTGA |
| SEQ ID | GI 6272556 AF123887 | GAACTAAGGGCTTTA |
| NO: 269 | Homo sapiens EROIL | TCCAAAGTGTTACCA |
| | (EROIL) mRNA, | TTCTTCGAGCGCCCA |
| | | GATTTTCAACTCTTT |
| SEQ ID | GI 41349444 NM_014011 | TCTCATGTCTTTTCG |
| NO: 270 | Homo sapiens suppressor of cytokine signaling 5 | TTAATGTGCTCTGTA |
| | (SOCS5), transcript variant 1, mRNA | CCACTGGTGAGTGCT |
| | | CCATAGTTTCCTTAC |
| SEQ ID | GI 257467496 NG_012839 | AAGTCAGAGCTGGGA |
| NO: 271 | Homo sapiens glutamate metabotropic receptor 1 | TGAGGTGAAAGTGTT |
| | (GRM1), RefSeqGene on chromosome 6 | ATAGGAAGAAGAAAT |
| | | AGCATGTGCATAGGG |
| SEQ ID | GI 195234781 NG_008319 | GGTTGCTGTTTACTT |
| NO: 272 | Homo sapiens pyruvate carboxylase | TCCTCTTCCAGGAAC |
| | (PC), RefSeqGene on chromosome 11 | TGAAGCTGTTTCCCA |
| | | TTGGATTTCTTTACT |
| SEQ ID | GI 117606467 EF064708 | CTGAGGACATTATCA |
| NO: 273 | Homo sapiens tumor necrosis factor | AAAGGAGAGCAAGAA |
| | (ligand) family, member 10 | AGAGAAGAGAGAAAT |
| | (TNFSF10) gene, complete cds | GGGCTTGAGGTGAGT |
| SEQ ID | GI 208022628 NM_004887 | GAACTCAAGTTTGGT |
| NO: 274 | Homo sapiens C-X-C motif chemokine ligand 14 | TGCCAGAAAAATGTG |
| | (CXCL14), mRNA | CTTCATTCCCCCCTG |
| | | GTTAATTTTTACACA |
| SEQ ID | GI 387763637 NM_001098272 | CCCTTCTCTTGCATT |
| NO: 275 | Homo sapiens 3-hydroxy-3- | CCTCAAACATGCTGA |
| | methylglutaryl-CoA synthase 1 | GTTTATTCCAGCCTT |
| | (HMGCS1), transcript variant 1, mRNA | AAGCCTTTGATCTAC |
| SEQ ID | GI 71648775 DQ143945 | CAGGCATGTATGAAT |
| NO: 276 | Homo sapiens adrenomedullin | GAAAGAGTGACTCAA |
| | (ADM) gene, complete cds | GATTCCTGTCATGGA |
| | | ATTTCTGTGCCAGTG |
| SEQ ID | GI 117606501 EF064725 | TTTCCATGAGCTACA |
| NO: 277 | Homo sapiens interferon, beta 1, fibroblast | ACTTGCTTGGATTCC |
| | (IFNB1) gene, complete cds | TACAAAGAAGCAGCA |
| | | ATTTTCAGTGTCAGA |
| SEQ ID | GI 298104098 NG_021428 | CTTCAGGACAAAGAA |
| NO: 278 | Homo sapiens C-C motif chemokine receptor 2 | GGAGCCTAGAGACAG |
| | (CCR2), RefSeqGene on chromosome 3 | AAATGACAGATCTCT |
| | | GCTTTGGAAATCACA |
| SEQ ID | GI 345478675 NG_029883 | GCCTTAGAGACAAAA |
| NO: 279 | Homo sapiens death associated protein kinase 1 | AGAGCTCAAACTCAA |
| | (DAPK1), RefSeqGene on chromosome 9 | ACAGTCCAAGCATAG |
| | | CACAGATCCAATAGC |
| SEQ ID | GI 41872630 NM_004104 | CCCCGTTTCATTTTT |
| NO: 280 | Homo sapiens fatty acid synthase | ACACCAATTTGGTAA |
| | (FASN), mRNA | AAATGCTGCTCTCAG |
| | | CCTCCCACAATTAAA |
| SEQ ID | GI 698320876 NM_015995 | GCCACGTTTCATCTT |
| NO: 281 | Homo sapiens Kruppel like factor 13 | TCCTGGATCACTACA |
| | (KLF13), transcript variant 1, mRNA | GTGAAGTATTACAGT |
| | | TGTACAGTTCCCAGT |
| SEQ ID | GI 1212624021 NM_017523 | TAACCAAAACTGCAT |
| NO: 282 | Homo sapiens XIAP associated factor 1 | GATACTGGTACAAAA |
| | (XAF1), transcript variant 1, mRNA | GCATGGTGCTGGTAC |
| | | AAAAGCAGACACATA |
| SEQ ID | GI 68248543 DQ096732 | GGGACCAATGATTAC |
| NO: 283 | Homo sapiens glutathione peroxidase 7 | CTCATAGGGCTGTTG |
| | (GPX7) gene, complete cds | TGAGGATTAGGATGA |
| | | AATACCTGTGAAAGT |
| SEQ ID | GI 228008299 NG_011964 | TAAATGGAGTTGGAC |
| NO: 284 | Homo sapiens arginase 2 | AATGTGGACAGAATC |
| | (ARG2), RefSeqGene on chromosome 14 | CACTACCCAGGTTGG |
| | | GAATTAATCTGATGA |
| SEQ ID | GI 1122782504 NG_013302 | TGTCTGATGGAAATA |
| NO: 285 | Homo sapiens catenin beta 1 | GATGTTATTTGTGTA |
| | (CTNNB1), RefSeqGene on chromosome 3 | GTCTCATGGGTGGCC |
| | | TGGCACTGAGTAATT |
| SEQ ID | GI 209447065 NG_008724 | AAAAGAGCCTCAGAT |
| NO: 286 | Homo sapiens NLR family | GAGGTTACAGTTCTC |
| | apoptosis inhibitory protein | TTGAGACCAAGGTGT |
| | (NAIP), RefSeqGene on chromosome 5 | CTTGCATGTATCATC |
| SEQ ID | GI 353249887 NG_030361 | ATCTGTATCATCAGT |
| NO: 287 | Homo sapiens Spl transcription factor | GCCTCTTTGAAGGTG |
| | (SP1), RefSeqGene on chromosome 12 | GGAAACATTAGTGAA |
| | | AATTCTGTTGGTGCC |
| SEQ ID | GI 222080101 NM_022121 | CTGGATACAGTGTGC |
| NO: 288 | Homo sapiens PERP, TP53 apoptosis effector | AGTGCATTCTTCCTG |
| | (PERP), mRNA | AATTTTGCAATTCTG |
| | | GTATCTGGGTGTATT |
| SEQ ID | GI 371875636 NM_182919 | CAGAACTGGATACGG |
| NO: 289 | Homo sapiens toll like receptor | TGTTTACAATTCCAA |
| | adaptor molecule 1 | TCTCTCTATTTCTGG |
| | (TICAM1), mRNA | GTGAAGGGTCTTGGT |
| SEQ ID | GI 226061859 NG_011749 | AGTTCATTCTCACTC |
| NO: 290 | Homo sapiens peroxisome proliferator | TTCTCTCTTGGTTGA |
| | activated receptor gamma | GTCTTGCCTTTCTTC |
| | (PPARG), RefSeqGene on chromosome 3 | ACTCTGTTCCCTTTC |
| SEQ ID | GI 281332104 NG_016228 | CTCAGTAACTTGGTT |
| NO: 291 | Homo sapiens toll like receptor 1 | TTGCATTGACTTTCC |
| | (TLR1), RefSeqGene on chromosome 4 | ATTCTTCCTTGGTCA |
| | | CTCTTCTCATTCGGG |
| SEQ ID | GI 32815079 AY338491 | CTGCAGGCCAAAATG |
| NO: 292 | Homo sapiens cyclin B1 | CCTATGAAGAAGGTA |
| | (CCNB1) gene, complete cds | ACTCTCTTCCTGACC |
| | | TAACTTCTGTAAGAG |
| SEQ ID | GI 326806980 NG_028248 | AAGGGATGGCCAAAT |
| NO: 293 | Homo sapiens aryl hydrocarbon | ACCTGCAGAGATCAT |
| | receptor nuclear translocator | CACATTTTTACCTGT |
| | (ARNT), RefSeqGene on chromosome 1 | CTTACTGTAGTCGTT |
| SEQ ID | GI 939106626 NG_029107 | TGAGATCTCTAAGCC |
| NO: 294 | Homo sapiens integrin subunit alpha 3 | ACTCTCAGATCCACA |
| | (ITGA3), RefSeqGene on chromosome 17 | CTTTACAGCTTTCCA |
| | | AAAAGTGTTCCTGAC |
| SEQ ID | GI 340007370 NG_U29431 | TCAAGCTTCAGCCTA |
| NO: 295 | Homo sapiens ras-related C3 | CTAAATCTCTGTTTT |
| | botulinum toxin substrate 1 | TATGTTTTGTTTTCC |
| | (rho family, small G1P binding | AGGCCCTATGCCTGG |
| | protein Rac1) | |
| | (RAC [symbol] | |
| SEQ ID | GI 1027860277 NG_047185 | ACTCAGAAAAATAGC |
| NO: 296 | Homo sapiens NLR family member XI | TTGTGGGAGCCCAGT |
| | (NLRX1), RefSeqGene on chromosome 11 | GTTTGGACTCTATAA |
| | | GTAACCTTGGACTTT |
| SEQ ID | GI 1024336768 NG_046906 | GTTTTCTGCACTCAT |
| NO: 297 | Homo sapiens TANK binding kinase 1 | GTCGCTATGTATGTG |
| | (TBK1), RefSeqGene on chromosome 12 | CCCTTGGACTGTAAT |
| | | GCTTTTGACAGTTTA |
| SEQ ID | GI 209862906 NM_006475 | CGTGAGGAAGTTGCA |
| NO: 298 | Homo sapiens periostin | AGCCAACAAAAAAGT |
| | (POSTN), transcript variant 1, mRNA | TCAAGGATCTAGAAG |
| | | ACGATTAAGGGAAGG |
| SEQ ID | GI 293629222 NG_017001 | GGCTCTTGTTTCTTG |
| NO: 299 | Homo sapiens hepatitis A virus | TTTGACTTATGCTCA |
| | cellular receptor 1 | CTCTCATGTTGATTT |
| | (HAVCR1), RefSeqGene on chromosome 5 | CTGACTCCAGCCAAG |
| SEQ ID | GI 193290114 NG_008154 | TAGATGGGTTGCTCA |
| NO: 300 | Homo sapiens insulin receptor substrate 2 | TTAGTGCATATCACT |
| | (IRS2), RefSeqGene on chromosome 13 | GTGAGTTGACCAGGG |
| | | GTAATAGCATTTGAG |
| SEQ ID | GI 584593316 NG_033952 | ACAGTCTACTCACTT |
| NO: 301 | Homo sapiens mitogen-activated | GGTTGTTTTTTTCTG |
| | protein kinase kinase 4 | GTGGCCAGCCCCTAT |
| | (MAP2K4), RefSeqGene on chromosome 17 | CCTGAAGTTATATAG |
| SEQ ID | GI 300244554 NG_023330 | ATTGAAAACAAGAGA |
| NO: 302 | Homo sapiens SMAD family member 7 | CCAGCAAGGGTCCTT |
| | (SMAD7), RefSeqGene on chromosome 18 | GTGAATTATGATGGT |
| | | TTGGCGTGAGAATAG |
| SEQ ID | GI 32891798 AY341246 | GGGAGATCTCAAGTA |
| NO: 303 | Homo sapiens catechol-O-methyltransferase | TCCCAAAGGAGCCAC |
| | (COMT) gene, complete cds | TGATGTTCCAAATTA |
| | | TCCTTGGTAAAGTCA |
| SEQ ID | GI 22128580 AF533019 | AACTTCCTGGATTAT |
| NO: 304 | Homo sapiens growth arrest and | CCTCGCCAAGGACTT |
| | DNA-damage-inducible, beta | TGCAATATATTTTTC |
| | (GADD45B) gene, complete cds | CGCCTTTTCTGGAAG |
| SEQ ID | GI 37654535 AY434089 | CATTTCTCAGTTAAA |
| NO: 305 | Homo sapiens insulin-like growth | CTTTGTCAAACTGTG |
| | factor binding protein 1 | AACACATGGACTTTC |
| | (IGFBP1) gene, complete cds | AGGAGAGGAGCCCAC |
| SEQ ID | GI 395393980 NG_011966 | CTTCCACAACATCTG |
| NO: 306 | Homo sapiens mitogen-activated | TGCCCATCTACTCTG |
| | protein kinase kinase kinase 7 | CTTTCTTCTGTTACT |
| | (MAP3K7), RefSeqGene on chromosome 6 | CTGGCTAAACTATCC |
| SEQ ID | GI 209870110 NM_013943 | AAAAGCTAGCTAGTA |
| NO: 307 | Homo sapiens chloride intracellular channel 4 | AAAAGGACGACCCAG |
| | (CLIC4), mRNA | CAACATGCTTTAACC |
| | | CCATTGTATGTTTGT |
| SEQ ID | GI 148227403 NM_005292 | AAGCATTGCTTTATG |
| NO: 308 | Homo sapiens G protein-coupled receptor 18 | GCTTCTTGCCTTTAT |
| | (GPR18), transcript variant 1, mRNA | TAGTGCTGACAGATA |
| | | CATGGCCATTGTACA |
| SEQ ID | GI 315630394 NM_002611 | CTTCTGTGTATATAG |
| NO: 309 | Homo sapiens pyruvate dehydrogenase kinase 2 | TTAGTTTTATAACCC |
| | (PDK2), transcript variant 1, mRNA | TGAATGCCCCCACCC |
| | | TTCCCCTAAGCACAC |
| SEQ ID | GI 38202233 NM_052864 | ACCAGTTTTGAAGAT |
| NO: 310 | Homo sapiens TRAF interacting protein | GCTGACACAGAAGAG |
| | with forkhead associated domain | ACAGTAACTTGTCTC |
| | (TIFA), mRNA | CAGATGACGGTTTAC |
| SEQ ID | GI 117606531 EF064740 | GTAGATGCTTAAACC |
| NO: 311 | Homo sapiens Epstein-Barr virus induced gene 3 | TCAGCTTCCCTATCT |
| | (EBI3) gene, complete cds | GGAAAATGGGCTAGT |
| | | AGTCCTCACCTAGAT |
| SEQ ID | GI 193290117 NG_008157 | GAGGCTGATGAAGTG |
| NO: 312 | Homo sapiens hydroxysteroid | AATTGGGAGACAAAG |
| | 17-beta dehydrogenase 3 | GTGCTTAATTCTTTA |
| | (HSD17B3), RefSeqGene on chromosome 9 | GCCATCCTGTTGATG |
| SEQ ID | GI 237858771 NG_012125 | CTGTCAAGGTACTGT |
| NO: 313 | Homo sapiens selectin P | AACAGTGGTAATGTT |
| | (SELP), RefSeqGene on chromosome 1 | TTTCTGTGTGTCTCA |
| | | GCTCGTTAGAGGCAT |
| SEQ ID | GI 194294528 NG_008241 | TGCAGAGTGGGTTGA |
| NO: 314 | Homo sapiens succinate-CoA ligase | TACAATTTGACTGAA |
| | ADP-forming beta subunit | AGCCCCAAACCTCTA |
| | (SUCLA2), RefSeqGene on chromosome 13 | ATCACATTGTCAATC |
| SEQ ID | GI 94717603 DQ508420 | GTGATAAACCACATG |
| NO: 315 | Homo sapiens caspase 5, apoptosis- | CTAAAGAACAACGTG |
| | related cysteine peptidase | GCTGGACAAACATCT |
| | (CASP5) gene, complete cds | ATCCAGACCCTAGTA |
| SEQ ID | GI 47777672 AY623118 | CAATGACTTTGTTTT |
| NO: 316 | Homo sapiens hexokinase 2 | AAGGGGAAACTCTTG |
| | (HK2) gene, complete cds | AAGGAATGGGGCCTA |
| | | CTTGTTGCTATACCC |
| SEQ ID | GI 74418831 DQ185447 | GAAGTGCTCATGTGT |
| NO: 317 | Homo sapiens interferon, alpha l | GGAGAGAGTGTAGAC |
| | (IFNA1) gene, complete cds | AGAGAAAAGGACTTA |
| | | AGCAGGATTTTGAGG |
| SEQ ID | GI 219521814 NG_009215 | CCATACAGCTTGTTT |
| NO: 318 | Homo sapiens bone morphogenetic protein 4 | CTGTTGTTTGGTGCA |
| | (BMP4), RefSeqGene on chromosome 14 | TTAGGCCAAAAGACC |
| | | TAGGCCTAATAGATG |
| SEQ ID | GI 834400732 NG_042181 | GAAAAGTAAGGGACT |
| NO: 319 | Homo sapiens collagen type XII alpha 1 chain | GGAAGGGACTGTGCT |
| | (COL12A1), RefSeqGene on chromosome 6 | CTTCCATTCTCAAAT |
| | | TCTAATCTGTGTCCA |
| SEQ ID | GI 262331531 NG_013343 | CAGGGGATGGAGGTA |
| NO: 320 | Homo sapiens endothelin receptor type A | AAAAAAAAAAAAAAG |
| | (EDNRA), RefSeqGene on chromosome 4 | CAGAGTTGGGTAGTG |
| | | GAGACCCATCCTTAG |
| SEQ ID | GI 1020158924 NM_002895 | CATTCAGAGTTGTCT |
| NO: 321 | Homo sapiens RB transcriptional corepressor like 1 | CACCCCTTCTCGTGC |
| | (RBL1), transcript variant 1, mRNA | CTTTTCTCTCCTTGA |
| | | GCTTTATAAACAGAT |
| SEQ ID | GI 187423911 NM_003764 | GTTCTTTCCTAATTC |
| NO: 322 | Homo sapiens syntaxin 11 | TTCCCAAGCTGTGAG |
| | (STX11), mRNA | TCAGAAAGTCCTGGA |
| | | AGGAGTTGTAGGAAG |
| SEQ ID | GI 226958454 NG_011902 | CTTCGAAATTAAATG |
| NO: 323 | Homo sapiens CCHC-type zinc finger | CGGTTAGCATCATAT |
| | nucleic acid binding protein | AGTTCATTTTCCCCC |
| | (CNBP), RefSeqGene on chromosome 3 | TCCATGCTGCTGTGT |
| SEQ ID | GI 207440658 NG_008647 | TCCTTTTCACTTAGT |
| NO: 324 | Homo sapiens GTP cyclohydrolase 1 | GGAAGAGCAGTTGCA |
| | (GCH1), RefSeqGene on chromosome 14 | GACATGAAAGGTTTT |
| | | CAAGAAGCCTTTCTG |
| SEQ ID | GI 1028908925 NG_050621 | CTGGCAACCCTGAAA |
| NO: 325 | Homo sapiens glutathione peroxidase 4 | TAAACTCCCATTTCA |
| | (GPX4), RefSeqGene on chromosome 19 | GTGCACATGTTTGCA |
| | | ACAAACTTAAGGAAA |
| SEQ ID | GI 193290117 NG_008157 | CTTGTAGTTGTGAGT |
| NO: 326 | Homo sapiens hydroxysteroid 17-beta dehydrogenase 3 | ATGATCAGGGTGTAC |
| | (HSD17B3), RefSeqGene on chromosome 9 | TATAGGGTGAGAGGA |
| | | GTCCTAAGCAAGTGC |
| SEQ ID | GI 238018080 NG_012203 | CGCAGATTTGCCTTC |
| NO: 327 | Homo sapiens phospholipase A2 group IVA | CTGGATCTAAATGCA |
| | (PLA2G4A), RefSeqGene on chromosome 1 | CTGTGGAGTCAAAGA |
| | | TTAAGGTGTTTCTTT |
| SEQ ID | GI 1028916196 KU928257 | AATCTCTAACTTCCA |
| NO: 328 | Homo sapiens complement decay-accelerating factor | AGGTCCCACCAACAG |
| | (CD55) gene, CD55-203A allele, complete cds | TTCAGAAACCTACCA |
| | | CAGTAAATGTTCCAA |
| SEQ ID | GI 93009032 DQ464902 | AAGCTGAAGAGGAAG |
| NO: 329 | Homo sapiens nexilin | CAAGAAAACGTTTAG |
| | (NEXN) mRNA, complete cds | AAGAAGAGAAGCGTG |
| | | CTTTTGAAGAAGCAA |
| SEQ ID | GI 284172478 NM_052946 | TTCCAAATTCTAGGA |
| NO: 330 | Homo sapiens nitric oxide synthase trafficking | GACCCTAGAGATGAT |
| | (NOSTRIN), transcript variant 1, mRNA | CCAGTATAACCCCTG |
| | | GTGTCACAGAAACAG |
| SEQ ID | GI 356582493 NM_001244 | CGGGATACTTCTTTT |
| NO: 331 | Homo sapiens TNF superfamily member 8 | ATCTGCAGATGGCCT |
| | (TNFSF8), transcript variant 1, mRNA | AATACTTAGTTGTCC |
| | | AAGTCGCGATCAAGG |
| SEQ ID | GI 20147702 AF493905 | ACCCACTTCACATGT |
| NO: 332 | Homo sapiens guanine nucleotide | GCCACAGATACTAAG |
| | binding protein alpha il | AATGTGCAGTTTGTT |
| | (GNAIl) mRNA, complete cds | TTTGATGCTGTAACA |
| SEQ ID | GI 156071494 NM_002787 | ATCTGCAATGAAGCT |
| NO: 333 | Homo sapiens proteasome subunit alpha 2 | GGATTTAGGAGGCTT |
| | (PSMA2), mRNA | ACTCCAACTGAAGTT |
| | | AAGGATTACTTGGCT |
| SEQ ID | GI 41353192 AY486465 | GAGGGATATAGTATT |
| NO: 334 | Homo sapiens glutathione transferase kappa 1 | CACAAGTCTCCACAA |
| | (GSTK1) gene, complete cds | ACTCCAACACAAACC |
| | | TCACCAACACATCCA |
| SEQ ID | GI 359718928 NG_031876 | GAAACTTGCAAGGCT |
| NO: 335 | Homo sapiens biliverdin reductase A | GAAGAAAGAGAGGCA |
| | (BLVRA), RefSeqGene on chromosome 7 | GTTAGTCATAGGAGA |
| | | CAGTTCAGTCAGATG |
| SEQ ID | GI 345110544 NG_029851 | CTTATATCACTGGGA |
| NO: 336 | Homo sapiens phospholipase D1 | AACTAGAAGCAGTTT |
| | (PLD1), RefSeqGene on chromosome 3 | CCCAGCTCCCATATT |
| | | CTCTTGCATCCATCC |
| SEQ ID | GI 336088682 NG_029094 | CGGTTGGATCAGGAT |
| NO: 337 | Homo sapiens apoptotic | GAGAGTTTTTCCCAG |
| | peptidase activating factor 1 | AGGCTTCCACTTAAT |
| | (APAF1), RefSeqGene on chromosome 12 | ATTGAAGAGGCTAAA |
| SEQ ID | GI 746815960 NM_004929 | TGAAATTTACAGTTA |
| NO: 338 | Homo sapiens calbindin 1 | CTGCCTAGGAGTTAA |
| | (CALB1), mRNA | TGATCGTTCTGGGTC |
| | | AGCTTGAATGTCCCC |
| SEQ ID | GI 52352731 AY751746 | AGACACAGCCTGGAC |
| NO: 339 | Homo sapiens jun B proto-oncogene | CACTCCAGACAAGAC |
| | (JUNB) gene, complete cds | AATAAATAAACAAGC |
| | | AAACATGGTTCTTTG |
| SEQ ID | GI 336391122 NG_029141 | ATCTTTTCAGAATTG |
| NO: 340 | Homo sapiens interferon gamma | GTCTCCTGGAGGGGG |
| | inducible protein 16 | CATAATTGGGTAATT |
| | (IFI16), RefSeqGene on chromosome 1 | TTTCTGCCAAATGAG |
| SEQ ID | GI 336285236 NG_029146 | ACTTCTGTTTGTCTT |
| NO: 341 | Homo sapiens MCL1, BCL2 | ACGCTTCTCTCAGGG |
| | family apoptosis regulator | AAAAACATGCAGTCC |
| | (MCL1), RefSeqGene on chromosome 1 | TCTAGTGTTTCATGT |
| SEQ ID | GI 105990527 NM_012258 | GCTTTTTAAAGAACT |
| NO: 342 | Homo sapiens hes related family Bhlh | GATGTAGAATGAGGG |
| | transcription factor with YRPW motif 1 | AGGGGAAAGTTTAAA |
| | (HEY1), transcript variant 1, | ATCCCAGCTGGGCTG |
| SEQ ID | GI 260898757 NM_021571 | AGACATGTACAGCTT |
| NO: 343 | Homo sapiens caspase recruitment | ACTTTGGTGCTTTTA |
| | domain family member 18 | GCACTGAGAGTCTGC |
| | (CARD18), mRNA | TGTGATGGGAATAAA |
| SEQ ID | GI 332000013 NM_002733 | GTATACTTCCTTCAT |
| NO: 344 | Homo sapiens protein kinase AMP- | GAAGTCTCATCGCTG |
| | activated non-catalytic subunit gamma l | CTATGACCTGATTCC |
| | (PRKAG1), transcript variant 1 | CACAAGCTCCAAATT |
| SEQ ID | GI 194018737 NG_008190 | AAAGCCAGAAATTCC |
| NO: 345 | Homo sapiens acyl-CoA oxidase 1 | AGAGCATAAACATCT |
| | (ACOX1), RefSeqGene on chromosome 17 | CGTGACTGTCCTTTC |
| | | ATCTGTGGTAGGAAT |
| SEQ ID | GI 345441799 NG_029868 | GATTTTTCCTCCTTC |
| NO: 346 | Homo sapiens advanced glycosylation | AGAGATTCCTGGGAA |
| | end-product specific receptor | GCCAGAAATTGTAGA |
| | (AGER), RefSeqGene on chromosome | TTCTGCCTCTGAACT |
| SEQ ID | GI 821325145 NG_029706 | GGTAAGATAACCAAG |
| NO: 347 | Homo sapiens SH2B adaptor protein 1 | TGGGAGCCTCTAGAA |
| | (SH2B1), RefSeqGene on chromosome 16 | TGGCTCATGGGAAGT |
| | | GTGACATGAATATTG |
| SEQ ID | GI 156071494 NM_002787 | GTGCACAGAGCTCGA |
| NO: 348 | Homo sapiens proteasome subunit alpha 2 | AAACTAGCTCAACAA |
| | (PSMA2), mRNA | TACTATCTTGTGTAC |
| | | CAAGAACCCATTCCT |
| SEQ ID | GI 19718735 NM_003265 | ACTCCACCTCACTAT |
| NO: 349 | Homo sapiens toll like receptor 3 | CATGGGTTCCCAGTG |
| | (TLR3), mRNA | AGACTTTTTGATACA |
| | | TCATCTTGCAAAGAC |
| SEQ ID | GI 353703739 NG_030372 | GGGACTTAATAGACA |
| NO: 350 | Homo sapiens CD83 molecule | CATGTGCAAGAGGCT |
| | (CD83), RefSeqGene on chromosome 6 | AAAGGTGAAGCCAAA |
| | | AGTGGACAGAGATAT |
| SEQ ID | GI 195546896 NG_008330 | TCCACCTCCTTACAT |
| NO: 351 | Homo sapiens integrin subunit alpha 2 | ACTGACCTGTATTTC |
| | (ITGA2), RefSeqGene on chromosome 5 | AGAGAGCCTCTTATT |
| | | GCCATTCAGAGATCC |
| SEQ ID | GI 187473251 EU600171 | TTGGGATTTAATGCC |
| NO: 352 | Homo sapiens v-raf murine sarcoma | CTCAAATCGAGGAAC |
| | viral oncogene homolog B1 | ACAATGCACTAAAAG |
| | (BRAF) gene, complete cds | TCCTACACAGCAAAG |
| SEQ ID | GI 114731556 DQ866809 | ATATTCCAAGGATCC |
| NO: 353 | Homo sapiens endoglin | TTGAGTTCATGACAA |
| | (Osler-Rendu-Weber syndrome 1) | CAAAATCTCCCTGTT |
| | (ENG) gene, complete cds | AGCCTCTGCCTCTTC |
| SEQ ID | GI 238776813 NG_012250 | CTGAAAAGTGGAAAT |
| NO: 354 | Homo sapiens aldehyde dehydrogenase 2 family | GAACATAGTGCCTGT |
| | (mitochondrial) | CTTAGGGAGGTAATT |
| | (ALDH2), RefSeqGene on chromosome 12 | AGGGCTTAGCATGGT |
| SEQ ID | GI 224809296 NG_011498 | TTCCTCCAGAGTCCC |
| NO: 355 | Homo sapiens interleukin 23 receptor | TTATTCATGAGTTTT |
| | (IL23R), RefSeqGene on chromosome 1 | CACAGTAATCCTTTT |
| | | CACATGCACCTCAGG |
| SEQ ID | GI 1800224 U70065 Human JAK3 gene, complete cds | CACTTTAGGTAGGCT |
| NO: 356 | | GGGAACGTGATTATT |
| | | GATCCAGATTCACAT |
| | | GGGTTACAGGTTTGA |
| SEQ ID | GI 225903414 NG_011740 | CAGTGACAAACATAT |
| NO: 357 | Homo sapiens matrix metallopeptidase 1 | CCTTTCAAGACAGAA |
| | (MMP1), RefSeqGene on chromosome 11 | AGAGACAGGAGACAT |
| | | GAGTCTTTGCCGGAG |
| SEQ ID | GI 291045304 NG_016710 | GACACAAATACGAAA |
| NO: 358 | Homo sapiens ribose 5-phosphate isomerase A | GTGTTGGGGTTATTG |
| | (RPIA), RefSeqGene on chromosome 2 | GAGGTTCTTTGTGTA |
| | | GAATCTCTGGGGAGT |
| SEQ ID | GI 117606501 EF064725 | GGGCCTTCTCTATCC |
| NO: 359 | Homo sapiens interferon, beta 1, fibroblast | TTGTCTCTGTTGTTT |
| | (IFNB1) gene, complete cds | ATATCCTGCTGAAGT |
| | | GTGATTCCACTTGTG |
| SEQ ID | ref\|NG_008776.1\| | GATATGCTGTGGAAA |
| NO: 360 | Homo sapiens ciliary neurotrophic factor | TACTCCAACCCCTGT |
| | (CNTF), RefSeqGene on | GGAGAGTTTTGAATT |
| | | TAGGCTGAGAACTGA |
| SEQ ID | GI 18141132 AF424815 | CATATCATTCTGGAG |
| NO: 361 | Homo sapiens SH2 domain containing SOCS | GTGCACTTACTCTTC |
| | box protein SOCS4 mRNA, complete cds | TACAATGTGGCCGGA |
| | | TCATTTGTCATTCCT |
| SEQ ID | GI 13447389 AF361105 | CTCTGCTTCCAAACC |
| NO: 362 | Homo sapiens interleukin 9 | CTTTGCTGTTTGCAT |
| | (IL9) gene, complete cds | TCTGCCCCTTTCTTA |
| | | TTCTCTTTATACCAA |
| SEQ ID | GI 209977031 NG_008839 | TCATTTGTGTGGAAA |
| NO: 363 | Homo sapiens 24-dehydrocholesterol reductase | GTCAGAGGAAAAATG |
| | (DHCR24), RefSeqGene on chromosome 1 | ATCCAGTGGACACTT |
| | | GGGGATTATCTGTCA |
| SEQ ID | GI 336285236 NG_029146 | GCCCAAAACATAAAT |
| NO: 364 | Homo sapiens MCL1, BCL2 | GGGTGGTATGGACGC |
| | family apoptosis regulator | CGTATCACCTTACTA |
| | (MCL1), RefSeqGene on chromosome 1 | AACTGTGACATTTTG |
| SEQ ID | GI 373432598 NM_001511 | CAAATGTTCTCCAGT |
| NO: 365 | Homo sapiens C-X-C motif chemokine ligand 1 | CATTATGTTAATATT |
| | (CXCL1), transcript variant 1, mRNA | TCTGAGGAGCCTGCA |
| | | ACATGCCAGCCACTG |
| SEQ ID | GI 342349316 NG_029618 | TGCTTCAGTTAATTC |
| NO: 366 | Homo sapiens CD28 molecule | AGGTGTTGAAGGAGC |
| | (CD28), RefSeqGene on chromosome 2 | TTAGGTTTTAGAGGC |
| | | ACGTAGACTTGGTTC |
| SEQ ID | GI 19072753 AF475085 | TCATGCTTATGAGAA |
| NO: 367 | Homo sapiens mucolipin-3 | CAAAGGTACCAAGCA |
| | (MCOLN3) mRNA, complete cds | ATCTGCTATGGCAAT |
| | | CTGTCAGCACTTCTA |
| SEQ ID | GI 31096355 AY300794 | CCTTCCCTGCTTTGT |
| NO: 368 | Homo sapiens PRKC, apoptosis, WT1, regulator | AGAAATCTTCTTCAT |
| | (PAWR) gene, complete cds | TCTGCTCAGGCTCTG |
| | | ATTTCTTAGGTCAGG |
| SEQ ID | GI 300193072 NG_023297 | AGCAATTGTAACGGT |
| NO: 369 | Homo sapiens cyclin dependent kinase inhibitor 2B | TAACTGTAACGTTTT |
| | (CDKN2B), RefSeqGene on chromosome 9 | CTTTCACACACACAC |
| | | ACACACACACACACA |
| SEQ ID | GI 569026730 NG_012887 | TGTGCTCATGCCTAC |
| NO: 370 | Homo sapiens cystatin C | TTGCAGTGAAATTTT |
| | (CST3), RefSeqGene on chromosome 20 | GGAAAGTCCTTGATT |
| | | CTTTCCTTGTGTTCA |
| SEQ ID | GI 315365062 HQ384162 | GTGGAAGTGACTTGC |
| NO: 371 | Homo sapiens cell death-inducing | TTATGAGCTGTTGAC |
| | DFFA-like effector a | AAATGAAACATTGGG |
| | (CIDEA) gene, complete cds | AAACCTTGAGTCTCC |
| SEQ ID | GI 281182565 NG_016196 | ATGTTATTTTTAAGC |
| NO: 372 | Homo sapiens endothelin 1 | TCCCTTTCTTGCCAA |
| | (EDN1), RefSeqGene on chromosome 6 | TCCCTCACGGATCTT |
| | | TCTCCGATAGATGCA |
| SEQ ID | GI 269954706 NG_015999 | AGATATTGGCACCTG |
| NO: 373 | Homo sapiens enoyl-CoA hydratase and | TGAAATGAGATTTAA |
| | 3-hydroxyacyl CoA dehydrogenase | CCTGTCGCTGCTGCT |
| | (EHHADH), RefSeqGene on chrc [symbol] | TAGTGTCACTAACTC |
| SEQ ID | GI 224809296 NG_011498 | TGTCTTTCAATCCTC |
| NO: 374 | Homo sapiens interleukin 23 receptor | TGCTTATATCAGGCT |
| | (IL23R), RefSeqGene on chromosome 1 | TACCAATGTCTGTTG |
| | | GCTCAAAGCAAGCTA |
| SEQ ID | GI 259013237 NG_012931 | CTTCATAACCAGGCT |
| NO: 375 | Homo sapiens ubiquitin C-terminal hydrolase L1 | TCCTTCTGTGGGTTT |
| | (UCHL1), RefSeqGene on chromosome 4 | GGCAGTGGTTTTTGG |
| | | AAGAATCTAAAACTT |
| SEQ ID | GI 1049010967 AH003492 | ATGAGTTAGGCTTTG |
| NO: 376 | Homo sapiens beta-fibrinogen | CACTTGTAAGGAAGG |
| | (FGB) gene, complete cds | AGAAGCGTGCACAAC |
| | | CTCAAATAGCTAATA |
| SEQ ID | GI 189217842 NG_007929 | AGGATAGAGACATAT |
| NO: 377 | Homo sapiens cytochrome P450 | GGGAGTCCAGTAGAC |
| | family 2 subfamily B member 6 | ATCAATCAAACTGGA |
| | (CYP2B6), RefSeqGene on chromosome 19 [symbol] | CTCAGTTTGCACACA |
| SEQ ID | GI 594591639 NG_034041 | TTCCCTTTTCTGAGT |
| NO: 378 | Homo sapiens sorbin and SH3 domain containing 1 | CATTCTCTCTTGGCC |
| | (SORBS1), RefSeqGene on chromosome 10 | TCCTACATTCTGAAG |
| | | AGGTCATTTGCATTG |
| SEQ ID | GI 1021312320 NM_001323565 | CAGTGTGCCTACATC |
| NO: 379 | Homo sapiens cysteine dioxygenase type 1 | AATGATTCCATTGGC |
| | (CDO1), transcript variant 1, mRNA | TTACATCGAGTAGAG |
| | | AACATCAGCCATACG |
| SEQ ID | GI 207028588 NM_021970 | TCAATAAGTAGGGCA |
| NO: 380 | Homo sapiens late endosomal/lysosomal | GGCATTCTCTATGCC |
| | adaptor, MAPK and MTOR activator 3 | TGCTAGGGAAGTGTG |
| | (LAMTOR3), transcript vari [symbol] | ACTTGTTATACTCTT |
| SEQ ID | GI 209571510 NM_015000 | GTTCTTACGGCTCAA |
| NO: 381 | Homo sapiens serine/threonine kinase 38 like | AAGGACCAGACTTGG |
| | (STK38L), mRNA | CTTGGATGACTTTGA |
| | | GTCTCTGAAAGTTAT |
| SEQ ID | GI 816197633 NG_008177 | AAAATGGGTGCATTA |
| NO: 382 | Homo sapiens GATA binding protein 4 | CCCATCGTTGTGGTT |
| | (GATA4), RefSeqGene on chromosome 8 | TGGTAATGAGCTGAG |
| | | AACAAAGAAGAAACA |
| SEQ ID | GI 323510659 NG_028143 | GGAAGGGTAGGGTGG |
| NO: 383 | Homo sapiens interleukin 18 | AAAGGGTTAAGCATG |
| | (IL18), RefSeqGene on chromosome 11 | CTGTTACTGAACAAC |
| | | ATAATTAGAAGGGAA |
| SEQ ID | GI 257153325 NG_012807 | CCATACAGTGGGAGT |
| NO: 384 | Homo sapiens ST3 beta-galactoside | ATTTTTCCTTTTGGT |
| | alpha-2,3-sialyltransferase 5 | GGCGGGAATGGAGTG |
| | (ST3GAL5), RefSeqGene on chromosome 1 | AGATGGTTATAAAGA |
| | [symbol] | |
| SEQ ID | GI 6746626 AF218586 | GTACCTCTCAGCTCT |
| NO: 385 | Homo sapiens Cide-b | GAACCCCAGTGACTT |
| | (CIDEB) mRNA, complete cds | ACTCAGGTCAGTATC |
| | | TAATATAAGCTCGGA |
| SEQ ID | GI 82659110 NM_007172 | TCATCACTAGGAGCG |
| NO: 386 | Homo sapiens nucleoporin 50 | ACAAGTGCCTCATTT |
| | (NUP50), transcript variant 2, mRNA | AATTTCGGCAAGAAA |
| | | GTTGATAGCTCTGTT |
| SEQ ID | GI 2428675 AY163769 | ATGCGGGTTCTAGTT |
| NO: 387 | Homo sapiens excision repair cross- | TTTCCACATCCTTGA |
| | complementing rodent repair deficiency, | CAACAGTGGCAGTTA |
| | complementation group 3 | TCTGCTTTTTTGATT |
| | (xeroc [symbol] | |
| SEQ ID | GI 11691883 AB034990 | CTATTGGGTACACAA |
| NO: 388 | Homo sapiens HERPUD1 gene for | ATTGGTGAAGCAGGT |
| | stress protein Herp, complete cds | GTAGCCTATGGTTGC |
| | | ATCATATGGCAAAAG |
| SEQ ID | GI 238018080 NG_012203 | AATTAGTTGAAAACT |
| NO: 389 | Homo sapiens phospholipase A2 group IVA | AACACCGTGAGTTCT |
| | (PLA2G4A), RefSeqGene on chromosome 1 | TCAGTGAGGGGTGCA |
| | | GAGCTCATTTTAGCT |
| SEQ ID | GI 62953114 NM_012342 | GTCTTATCTGAACTA |
| NO: 390 | Homo sapiens BMP and activin membrane | CACTTACTGAACAGC |
| | bound inhibitor | TTGAAGGCCTTTTGA |
| | (BAMB1), mRNA | GTTCTGCTGGACAGG |
| SEQ ID | GI 119220595 NM_016260 | CAAGTGACAGATAGT |
| NO: 391 | Homo sapiens IKAROS family zinc finger 2 | AAGAAAAGCTTCTTG |
| | (IKZF2), transcript variant 1, mRNA | AGCAGGTGGAGGTCA |
| | | CTGAATCCCCTACTA |
| SEQ ID | GI 4885488 NM_005372 | CAGTTAAGTTTGGGA |
| NO: 392 | Homo sapiens MOS proto-oncogene, | AAGTGTCTCAAGTAC |
| | serine/threonine kinase | TCACTAGATGTTGTG |
| | (MOS), mRNA | AACGGCCTGCTCTTC |
| SEQ ID | GI 343790995 NG_029773 | AAGCAAGCCTCCTCA |
| NO: 393 | Homo sapiens activating transcription factor 6 | TTGTCTAGAGGGAGA |
| | (ATF6), RefSeqGene on chromosome 1 | TTTTATCTCATCCTT |
| | | CAAGGTTGCTTGTTG |
| SEQ ID | GI 194595503 NG_008308 | GAGCATTTGGAAGGG |
| NO: 394 | Homo sapiens gap junction protein alpha l | GATAGGGAAGCACAT |
| | (GJA1), RefSeqGene on chromosome 6 | AAAGATGATATGCTC |
| | | AGCTTTACTGTCGTT |
| SEQ ID | GI 1031698869 NG_050687 | CCTTTTCTCTTCCCC |
| NO: 395 | Homo sapiens HOP homeobox | GTCTTCTCTCAGCCA |
| | (HOPX), RefSeqGene on chromosome 4 | CATCTCTCTTATCCT |
| | | ATCTTGGTGAAGAAG |
| SEQ ID | GI 385275063 NG_032144 | GCCAATGCAAAGAGA |
| NO: 396 | Homo sapiens transient receptor potential | GAAACTGGATGAACC |
| | cation channel subfamily V member 3 | ATATCACATTCTCAG |
| | (TRPV3), RefSeqGene on [symbol] | CCTGTCTCTAAGGAG |
| SEQ ID | GI 153792589 NM_001017963 | GAGCTGTTAAGGTAC |
| NO: 397 | Homo sapiens heat shock protein 90 | TACACATCTGCCTCT |
| | alpha family class A member 1 | GGTGATGAGATGGTT |
| | (HSP90AA1), transcript variant 1, n [symbol] | TCTCTCAAGGACTAC |
| SEQ ID | GI 117606501 EF064725 | AGCAGTTTAAGTCCA |
| NO: 398 | Homo sapiens interferon, beta 1, fibroblast | GTTTCAAACCAAGCA |
| | (IFNB1) gene, complete cds | AAAAGCCAGGAAACA |
| | | TAGGAGAAAGGGAAG |
| SEQ ID | GI 237874277 NG_012191 | GACCTGTCCTGTGAA |
| NO: 399 | Homo sapiens BCL2 associated X, | ATCACACTCTGTCAT |
| | apoptosis regulator | TTCCACAATATCCTC |
| | (BAX), RefSeqGene on chromosome 19 | TTGGTCACACTGTTT |
| SEQ ID | GI 225579089 NG_011672 | CTCATTCAGAGTTTC |
| NO: 400 | Homo sapiens decorin | GAATGCACCAAAAGG |
| | (DCN), RefSeqGene on chromosome 12 | GTGTTTCCAAAACAT |
| | | GATATGGGAAGGAGG |
| SEQ ID | GI 224809324 NG_011504 | TTGCAGTTGACAAAC |
| NO: 401 | Homo sapiens NAD | TGAAATTATCAGGAT |
| | (P)H quinone dehydrogenase 1 | CTCTGAGAAAGGGAC |
| | (NQO1), RefSeqGene on chromosome 16 | TAAGCTGGGGATTGG |
| SEQ ID | GI 538917457 NM_005896 | GGAAGTTCTGGTGTC |
| NO: 402 | Homo sapiens isocitrate dehydrogenase | ATAGATATCCCGTTT |
| | (NADP | TGTGAGGTAGAGCTG |
| | (+)) 1, cytosolic | TGCATTAAACTTGCA |
| | (IDH1), transcript variant 1, mRNA | |
| SEQ ID | ref\|NG_047051.1\| | AAAAAAATTCACAGC |
| NO: 403 | Homo sapiens growth differentiation factor 9 | CTGGGCAACAGACAG |
| | (GDF9), RefSeqGene | AGTTTTGCAGTTACC |
| | | CATGAAAAAAATCCC |
| SEQ ID | GI 221139813 NG_009361 | ACAGAAGATGAGGGA |
| NO: 404 | Homo sapiens BCL2, apoptosis regulator | ATCTTTGGAAATTTA |
| | (BCL2), RefSeqGene on chromosome 18 | GGCGACAGAGGCCAG |
| | | ACATACCAATAAACG |
| SEQ ID | GI 209447066 NG_008725 | TTCTCGTGACTCTCC |
| NO: 405 | Homo sapiens paraoxonase 2 | TTTGTATCTAGAACA |
| | (PON2), RefSeqGene on chromosome 7 | CAGTGTCTTTCCCCA |
| | | AAACCTGGGTCATAT |
| SEQ ID | GI 29542 X06596 Human mRNA for | CTTTAAGAAAATGCA |
| NO: 406 | complement component Cls | AAGAAGTGAAAGTGG |
| | | AGAAACCCACAGCAG |
| | | ATGCAGAGGCCTATG |
| SEQ ID | GI 189181756 NM_001710 | GACTTGCTATACATT |
| NO: 407 | Homo sapiens complement factor B | GGCAAGGATCGCAAA |
| | (CFB), mRNA | AACCCAAGGGAGGAT |
| | | TATCTGGATGTCTAT |
| SEQ ID | GI 384367978 NM_021797 | GGGCATAAACCTGAC |
| NO: 408 | Homo sapiens chitinase, acidic | CTGGTCTATATTCCC |
| | (CHIA), transcript variant 2, mRNA | TAGAGTTCCAGTCTC |
| | | TTTTGCTTAGGACAT |
| SEQ ID | GI 83267865 NM_001037494 | CCTTGCTAAGGGAAC |
| NO: 409 | Homo sapiens dynein light chain LC8-type 1 | ATCTCGATGTTTGAA |
| | (DYNLL1), transcript variant 1, mRNA | CCTTTGTTGTGTTTT |
| | | GTACAGGGCATTCTC |
| SEQ ID | GI 237858596 NG_012143 | TTTTTCGTTTTTTTT |
| NO: 410 | Homo sapiens nuclear receptor | TABACAGAGTCTTBC |
| | subfamily 0 group B member 2 | TCTGTCTABAGCAAG |
| | (NROB2), RefSeqGene on chromosome 1 | GCAGGAGGGCAGTAA |
| SEQ ID | GI 343962600 NG_029791 | GTATTCTCTGCCCTC |
| NO: 411 | Homo sapiens TNF receptor superfamily member 1B | ATAGGACACTCTAGT |
| | (TNFRSF1B), RefSeqGene on chromosome 1 | AGAGCAGCTGGGTGC |
| | | TAATAACAGAAACAC |
| SEQ ID | GI 588480544 NG_029714 | GTTGGATGACTGGAT |
| NO: 412 | Homo sapiens tissue factor pathway inhibitor | AGTCAAAGGAAGACT |
| | (TFPI), RefSeqGene on chromosome 2 | GAAGCTAGCATATGT |
| | | CTCTCCACCACATCT |
| SEQ ID | GI 984290537 NM_001319196 | ACAGGGATGACCTGA |
| NO: 413 | Homo sapiens S100 calcium binding protein A8 | AGAAATTGCTAGAGA |
| | (S100A8), transcript variant 1, mRNA | CCGAGTGTCCTCAGT |
| | | ATATCAGGAAAAAGG |
| SEQ ID | GI 238776812 NG_012249 | CTACTCTGGGACACT |
| NO: 414 | Homo sapiens aldehyde | GACTTGCCAGAATCC |
| | dehydrogenase 1 family member A1 | TCTTGTATCCTTCTT |
| | (ALDH1A1), RefSeqGene on chromosome 9 | CATCCTGACTTTCAT |
| SEQ ID | GI 973353146 NG_016274 | TCTGGGAACCAGATG |
| NO: 415 | Homo sapiens hepatocyte growth factor | CAAGTAAGCTGAATG |
| | (HGF), RefSeqGene on chromosome 7 | AGAATTACTGCCGAA |
| | | ATCCAGATGATGATG |
| SEQ ID | GI 338827643 NG_029228 | TGGTTAAGAAGACCA |
| NO: 416 | Homo sapiens OS9, endoplasmic reticulum lectin | CTGGAGGAGTAGACA |
| | (OS9), RefSeqGene on chromosome 12 | GATTACACGGACAGG |
| | | AAAGAAGCAAAGAAT |
| SEQ ID | GI 332078493 NM_002559 | AGCTGAGAACTTCAC |
| NO: 417 | Homo sapiens purinergic receptor P2X 3 | TATTTTCATCAAGAA |
| | (P2RX3), mRNA | CAGCATCCGTTTCCC |
| | | CCTCTTCAACTTTGA |
| SEQ ID | GI 90657251 DQ451402 | CATTGAGGAGGTAGA |
| NO: 418 | Homo sapiens heat shock 70 kDa protein 1A | TTAGGGGCCTTTCCA |
| | (HSPA1A) gene, complete cds | AGATTGCTGTTTTTG |
| | | TTTTGGAGCTTCAAG |
| SEQ ID | GI 32187528 AY324876 | GTCCATTCGTTCACT |
| NO: 419 | Homo sapiens lactoperoxidase | CATCCGTTTATTCAG |
| | (LPO) gene, complete cds | TAAATAGACATTGAC |
| | | CACCCCATACCAGGC |
| SEQ ID | GI 340523104 NG_029469 | ATTCCAGGTGTTCTA |
| NO: 420 | Homo sapiens heat shock protein family A | AATCTTGCTAAGAAC |
| | (Hsp70) member 9 | CCGGTGGGAATAAAG |
| | (HSPA9), RefSeqGene on chromosome 5 | GTTGCATGTACAGAG |
| SEQ ID | GI 224809271 NG_011477 | TATGATCACTGTACC |
| NO: 421 | Homo sapiens TNF superfamily member 4 | ACAGACAGTGCTTGT |
| | (TNFSF4), RefSeqGene on chromosome 1 | GTCTCCAAATTCCAG |
| | | AAGTGTAGCTAGTGT |
| SEQ ID | GI 1020158924 NM_002895 | CTGACAGTGGGAGTC |
| NO: 422 | Homo sapiens RB transcriptional | TTCGAAGAGATATGC |
| | corepressor like 1 | AACCATTGTCTCCAA |
| | (RBL1), transcript variant 1, mRNA | TTTCTGTCCATGAAC |
| SEQ ID | GI 257743127 NG_012865 | GGACTCCCTCTTCAT |
| NO: 423 | Homo sapiens amylo-alpha-1, | ACCTCTTGGACTCTA |
| | 6-glucosidase, 4-alpha-glucanotransferase | ACATCCTGCTCCATA |
| | (AGL), RefSeqGene on chromoson [symbol] | CTACCTATTACCCTT |
| SEQ ID | GI 219521908 NG_009245 | ACTAAACTGGCAGCT |
| NO: 424 | Homo sapiens bone morphogenetic | TCACATTTTCTTGCT |
| | protein receptor type 1B | CATTCTTCTCTCTAT |
| | (BMPR1B), RefSeqGene on chromosome 4 | GCACACAAGGGGTAA |
| SEQ ID | GI 226491119 NG_011810 | CCTGGAGAATCCCTT |
| NO: 425 | Homo sapiens 1,4-alpha-glucan branching enzyme 1 | CTTTTGTAGCAGCTC |
| | (GBE1), RefSeqGene on chromosome 3 | TGTGTCTTCAAGGGC |
| | | ATCATTATGTTATCC |
| SEQ ID | GI 218749810 NG_009188 | TTTGGCAAAACTGAT |
| NO: 426 | Homo sapiens phosphoglycerate dehydrogenase | TGCATGGAGCACTTC |
| | (PHGDH), RefSeqGene on chromosome 1 | TGTTGAACAGGCAAT |
| | | TCAAGCATTTATGTG |
| SEQ ID | GI 225579099 NG_011677 | AAAGGTCTGGATTGG |
| NO: 427 | Homo sapiens pyruvate kinase, liver and RBC | AGAGACATTTGGGAG |
| | (PKLR), RefSeqGene on chromosome 1 | TTGGCTACATATAGA |
| | | TGGTATCTCAAGCCA |
| SEQ ID | GI 189909140 EU779708 | AATATCCTCTGAACT |
| NO: 428 | Homo sapiens protein tyrosine phosphatase-2 | GTGCAGATCCTACCT |
| | (PTPN11) mRNA, complete cds | CTGAAAGGTGGTTTC |
| | | ATGGACATCTCTCTG |
| SEQ ID | GI 325910867 NM_004874 | CCATTATCCTTATGG |
| NO: 429 | Homo sapiens BCL2 associated athanogene 4 | AGATGGTAATCGTAG |
| | (BAG4), transcript variant 1, mRNA | TGTTCCACAATCAGG |
| | | ACCGACTGTACGACC |
| SEQ ID | GI 157427676 NM_004911 | GAGAAATTGTTGGCG |
| NO: 430 | Homo sapiens protein disulfide | TAGATTTGGCTTCTG |
| | isomerase family A member 4 | GTATGTGTTTCTGAT |
| | (PDIA4), mRNA | TGCTTCCTGTTGAGC |
| SEQ ID | GI 22859017 AY148100 Homo sapiens | TGTGTCTGCTGTTGT |
| NO: 431 | colony stimulating factor 3 receptor | TATTATCATTAGCCA |
| | (granulocyte) | GACCAGGTTAAGCTC |
| | (CSF3R) gene, complete cds | TCTCTCTCACACACA |
| SEQ ID | GI 334848111 NG_029036 | TGACTATCAGAGTTT |
| NO: 432 | Homo sapiens promyelocytic leukemia | GGCTTGTGTTTGGCT |
| | (PML), RefSeqGene on chromosome 15 | GATGAGCAAACCTGG |
| | | AATGAATCAGTGATA |
| SEQ ID | GI 224809246 NG_011451 | CTAGGATGTGTTGAA |
| NO: 433 | Homo sapiens integrin subunit alpha X | GGGCACACTGTCTGC |
| | (ITGAX), RefSeqGene on chromosome 16 | ATATAGTGAGTGATT |
| | | GAAGAACATGTTGGG |
| SEQ ID | GI 227908772 NG_011947 | ATGGACCTTTAATTT |
| NO: 434 | Homo sapiens tryptophan hydroxylase 1 | GCAGACACCAACTAG |
| | (TPH1), RefSeqGene on chromosome 11 | TTTCAACATGCTCTG |
| | | CCTTACTCTCCAAGT |
| SEQ ID | GI 130509310 NM_022073 | CTGTGGTTGGCAGTA |
| NO: 435 | Homo sapiens egl-9 family | TGACCAGAATCATGG |
| | hypoxia inducible factor 3 | AATTTGCTAGAACTG |
| | (EGLN3), transcript variant 1, mRNA | TGGAAGCTTCTACTC |
| SEQ ID | GI 908212430 NM_000412 | CAAACATCCTCTAAA |
| NO: 436 | Homo sapiens histidine rich glycoprotein | GCCAGACAATCAGCC |
| | (HRG), mRNA | CTTTCCTCAATCAGT |
| | | CTCTGAATCATGTCC |
| SEQ ID | GI 31657141 NM_181501 | ATTTGAAATGGAAAT |
| NO: 437 | Homo sapiens integrin subunit alpha 1 | GTCTCAGACTGGCTT |
| | (ITGA1), mRNA | CAGTGCTCATTATTC |
| | | ACAGGACTGGGTCAT |
| SEQ ID | GI 164698262 AK314515 | CCAAGCCTTCCTGCT |
| NO: 438 | Homo sapiens cDNA, FLJ95334, | GTAGACACAAGCTAC |
| | Homo sapiens protein inhibitor | ATTAATACCTCCCTC |
| | of activated STAT, 1 | ATCCAAGACTATAGG |
| | (PIAS1), mRNA | |
| SEQ ID | GI 385198082 NM_005226 | TAGCCAGCTGGAGAT |
| NO: 439 | Homo sapiens sphingosine-1- | AATTTACCAGGGAAT |
| | phosphate receptor 3 | GTTTCAAAGCCCTAA |
| | (S1PR3), mRNA | CCTTGAAGTTTGGAA |
| SEQ ID | GI 84872755 DQ355026 | GAATGGGAGAAGTAT |
| NO: 440 | Homo sapiens caspase 8, apoptosis- | AGACACATCTCCACT |
| | related cysteine peptidase | CCACCTCAAGTGAAC |
| | (CASP8) gene, complete cds | TATCTGGCTTTGTGT |
| SEQ ID | GI 584458486 NG_012245 | TGTCAGCTGGAAGCT |
| NO: 441 | Homo sapiens N-acetyltransferase 1 | TTTTGATGTGCTACA |
| | (NAT1), RefSeqGene on chromosome 8 | GCAAAAGGCTAAGAA |
| | | ATGGCGTATTGAAAT |
| SEQ ID | GI 338827643 NG_029228 | TCCTTGACTTGTTTC |
| NO: 442 | Homo sapiens OS9, endoplasmic reticulum lectin | TGACTTTAAAGGGGA |
| | (OS9), RefSeqGene on chromosome 12 | TGCTCCTGAAGTTTC |
| | | ACTGTTAGCGTGATG |
| SEQ ID | GI 237858601 NG_012145 | GCTATTATACAGAAG |
| NO: 443 | Homo sapiens TNF receptor superfamily member 10b | GTGAGGCCAAAAATG |
| | (TNFRSF10B), RefSeqGene on chromosome 8 | CTGGAGACACTGCTC |
| | | CTGAATCTCAGTTTT |
| SEQ ID | GI 33333853 AF546700 | TGCTTAGTTACTGGT |
| NO: 444 | Homo sapiens androgen regulated a/b hydrolase II | TTTCTCCATTGCATT |
| | (ABHD2) mRNA, complete cds | GTTAGGCATGGTGAC |
| | | AAGTGACAGAGTTCT |
| SEQ ID | GI 189217867 NG_007938 | TGTATCCATGGCAAT |
| NO: 445 | Homo sapiens cytochrome P450 | TTGCTTTCCCCTCAC |
| | family 3 subfamily A member 5 | TGAACTGAGATCAGA |
| | (CYP3A5), RefSeqGene on chromosome 7 | ATGTTACTCTGTTGG |
| SEQ ID | GI 374349248 NG_032045 | TGAGGCAGATTAGAC |
| NO: 446 | Homo sapiens phospholipase A2 group V | TTAAGACTGTAAGGA |
| | (PLA2G5), RefSeqGene on chromosome 1 | GTGGTTAAGGACTAG |
| | | GGCAGAGCAAAACAC |
| SEQ ID | GI 893579206 NG_007504 | AGGTTAAAGAAAACA |
| NO: 447 | Homo sapiens sonic hedgehog | AGAAACACAATCAGA |
| | (SHH), RefSeqGene on chromosome 7 | CCACAGAAAAGCCAG |
| | | GCAGAAAAGGGTTCG |
| SEQ ID | GI 296434305 NG_021272 | ATAAGGAGCTGATTC |
| NO: 448 | Homo sapiens signal transducer | TGCTAGGAGCAAGGT |
| | and activator of transcription 6 | CTTATCTCCACGATA |
| | (STAT6), RefSeqGene on chromosome 12 | TTCCAAAAGGTCAGG |
| SEQ ID | GI 5821735 AF155233 | TTTATTGGCATCTTA |
| NO: 449 | Homo sapiens snail zinc finger protein | TTCGACTAAGGCTAC |
| | (SNAIl) gene, complete cds | CCATTTCTCTTCCTT |
| | | CGTGCACCAATTGCT |
| SEQ ID | GI 283806588 NG_016341 | AAAAAAGCAACAGAA |
| NO: 450 | Homo sapiens cyclin dependent kinase inhibitor 1B | ACCTATCCTCACTGC |
| | (CDKN1B), RefSeqGene on chromosome 12 | CCTCCCCAGTCTCTC |
| | | TTAAAGTTGGAATTT |
| SEQ ID | GI 1146072968 NG_011674 | CTGGCAAGACAGCAT |
| NO: 451 | Homo sapiens glycine amidinotransferase | AACTCTGCATCTGCT |
| | (GATM), RefSeqGene on chromosome 15 | GTAACCCAGTGTTAA |
| | | ATTTTCAAAGGCTTC |
| SEQ ID | GI 1059792660 AH007003 | AAGCAACCTTGCTCT |
| NO: 452 | Homo sapiens MET proto-oncogene, | ACCTTCCCTCTGATA |
| | intron 2, 3′ end | GGGACATTTAGTCAT |
| | | CTTTGCATGTCTACT |
| SEQ ID | GI 334883185 NG_029065 | AGTAAGCAAATGGGC |
| NO: 453 | Homo sapiens cAMP responsive element modulator | AAAAAATGAAATGTA |
| | (CREM), RefSeqGene on chromosome 10 | AATGTGCAACCCGGA |
| | | ATTGGCAACTCTGTG |
| SEQ ID | GI 665505917 NM_006145 | ATTCCCCAGACATCA |
| NO: 454 | Homo sapiens DnaJ heat shock protein family | AGAACCGTACTTGAG |
| | (Hsp40) member B1 | CAGGTTCTTCCAATA |
| | (DNAJB1), transcript variant 1, mRNA | TAGCTATCTGAGCTC |
| SEQ ID | GI 429535870 NG_033021 | CTTTGGAGATTAAGG |
| NO: 455 | Homo sapiens interleukin 17A | CCCCTCAGAGATCAA |
| | (IL17A), RefSeqGene on chromosome 6 | CAGACCAACATTTTT |
| | | CTCTTCCTCAAGCAA |
| SEQ ID | GI 342349297 NG_029616 | AATCACCCGTCATTC |
| NO: 456 | Homo sapiens protein kinase C zeta | GGAGGTTTGTGTATG |
| | (PRKCZ), RefSeqGene on chromosome 1 | GGGAAGATCAGCTCA |
| | | GCATTATTTTTACAA |
| SEQ ID | GI 130509310 NM_022073 | CTACTCGGCCAGCGG |
| NO: 457 | Homo sapiens egl-9 family | TTTACCTGATAGATT |
| | hypoxia inducible factor 3 | CGGTAATACTATCAA |
| | (EGLN3), transcript variant 1, mRNA | GAGAAGAGCCTAGGA |
| SEQ ID | GI 219555683 NM_176891 | TCTGTTCTTTGTGTT |
| NO: 458 | Homo sapiens interferon epsilon | CAGTCTCACAGAAAA |
| | (IFNE), mRNA | ACTGAGCAAACAAGG |
| | | AAGACCCTTGAACGA |
| SEQ ID | GI 211904170 NG_008937 | TGGGTCAAGAAGTAC |
| NO: 459 | Homo sapiens CD44 molecule | TTCTCCTTCATCTTC |
| | (Indian blood group) | CTTTGATGTCGGTAA |
| | (CD44), RefSeqGene on chromosome 11 | CTCATCCTTTCTGCA |
| SEQ ID | GI 270047497 NG_016131 | AGCACATGTGTGAGA |
| NO: 460 | Homo sapiens connective tissue growth factor | AAAGCAGAGAAACAA |
| | (CTGF), RefSeqGene on chromosome 6 | CAAGGTATCTGATGC |
| | | TTCTGAGAACACGAG |
| SEQ ID | GI 341865611 NG_029556 | TCCATCCTGAGAGGG |
| NO: 461 | Homo sapiens growth factor | ATTAATAGGACATGT |
| | receptor bound protein 2 | GTAGAAACAGACTTA |
| | (GRB2), RefSeqGene on chromosome 17 | CACCTCCTCTCTCCC |
| SEQ ID | GI 210032106 NG_008851 | CAGTAATAGACCTGA |
| NO: 462 | Homo sapiens interleukin 1 beta | AGCTGGAACCCATGT |
| | (ILIB), RefSeqGene on chromosome 2 | CTAATAGTGTCAGGT |
| | | CCAGTGTTCTTAGCC |
| SEQ ID | GI 82880650 NM_004051 | CTGTGGAAATACTTC |
| NO: 463 | Homo sapiens 3-hydroxybutyrate dehydrogenase 1 | ACATTTGCATTCCAG |
| | (BDHl), transcript variant 1, mRNA | GACTGTTTTGGATCC |
| | | ATTTGCCCGAGAATC |
| SEQ ID | GI 46488017 AY601851 | GAAGAGTCTCATACA |
| NO: 464 | Homo sapiens mutS homolog 2, | ACGGAAGAGGCGTTA |
| | colon cancer, nonpolyposis type 1 | TATGAGACACCAAAG |
| | (E. coli) | TCCACGTTGAGTCTT |
| | (MSH2) gene, complete cds | |
| SEQ ID | GI 9837432 AF287892 | GTTTTCCTGCACTTC |
| NO: 465 | Homo sapiens sialic acid binding | AGTCTATGTCTGTGT |
| | immunoglobulin-like lectin 8 long | GTCAGTCCCTCTCAC |
| | splice variant | TAGTCTCTTTCTGTG |
| | (Siglec8) gene, complete cds | |
| SEQ ID | GI 224809353 NG_011513 | TCTCTCGTCCTCCTC |
| NO: 466 | Homo sapiens ATP binding cassette | TCTTAGAAGCTTTGA |
| | subfamily B member 1 | TGTCATTCTGTTCCT |
| | (ABCB1), RefSeqGene on chromosome 7 | TCCGTGTCTCTCTAG |
| SEQ ID | GI 260593637 NG_013005 | GGCACTCAAAGTATT |
| NO: 467 | Homo sapiens calcitonin receptor | TGTCGACTGAAAAAA |
| | (CALCR), RefSeqGene on chromosome 7 | ACTGATGATGTTTGG |
| | | GCTGCTGACTACTGC |
| SEQ ID | GI 269954724 NG_016003 | CTGCATCTTCAATTT |
| NO: 468 | Homo sapiens interferon alpha and | TTGTTGTCCCTAGCC |
| | beta receptor subunit 2 | CTCCAAATGCTGGAA |
| | (IFNAR2), RefSeqGene on chromosome 21 | TAAGTGGAAATGGAC |
| SEQ ID | GI 167614492 NM_016583 | CTGAGACCTCTAAGA |
| NO: 469 | Homo sapiens BPI fold containing family A member 1 | AGTCCAGATACTAAG |
| | (BPIFA1), transcript variant 1, mRNA | AGCAAAGATGTTTCA |
| | | AACTGGGGGCCTCAT |
| SEQ ID | GI 119703747 NM_001432 | ATGTATCCCAGGAGA |
| NO: 470 | Homo sapiens epiregulin | GTCCAGTGATAACTG |
| | (EREG), mRNA | CACAGCTTTAGTTCA |
| | | GACAGAAGACAATCC |
| SEQ ID | GI 321267517 NG_028118 | TCAGTAAGGAGTGTC |
| NO: 471 | Homo sapiens arrestin beta 1 | TTGGGAATGCAGACT |
| | (ARRB1), RefSeqGene on chromosome 11 | GCTTGAGGACAAAAA |
| | | AACTAGGGTGAAAAG |
| SEQ ID | GI 209977070 NG_008850 | CATATCCTACAGAAG |
| NO: 472 | Homo sapiens interleukin l alpha | ACCAGGCTTCTCTCT |
| | (ILIA), RefSeqGene on chromosome 2 | GGTCCTTGGTAGAGG |
| | | GCTACTTTACTGTAA |
| SEQ ID | GI 297515495 NG_021405 | CACCCCTCTTCTTGC |
| NO: 473 | Homo sapiens MHC class 1 | TATCTCCTATACCAA |
| | polypeptide-related sequence B | TAAATACGAAGGGCT |
| | (MICB), RefSeqGene on chromosome 6 | GTGGAAGATCAGAGC |
| SEQ ID | GI 148298657 NM_002089 | AATGGCCAGTGAGAT |
| NO: 474 | Homo sapiens C-X-C motif chemokine ligand 2 | CAATGTGACGGCAGG |
| | (CXCL2), mRNA | GAAATGTATGTGTGT |
| | | CTATTTTGTAACTGT |
| SEQ ID | GI 209413721 NM_021068 | TATCCATCTCAAGTA |
| NO: 475 | Homo sapiens interferon alpha 4 | GCCTAGCAATATTTG |
| | (IFNA4), mRNA | CAACATCCCAATGGC |
| | | CCTGTCCTTTTCTTT |
| SEQ ID | GI 21105788 AF512686 | ACCTTTGTTGCCCAG |
| NO: 476 | Homo sapiens interleukin 12B | CAAAGCCAAAACACT |
| | (natural killer cell stimulatory | GAGTTCTGGCCAATG |
| | factor 2, cytotoxic lymphocyte | AGATATAAGAAAATT |
| | maturation factor | |
| SEQ ID | GI 1025608659 NG_047042 | ATCTTTGCAGCTACC |
| NO: 477 | Homo sapiens cell division cycle 42 | ATAATCACCCTCTCT |
| | (CDC42), RefSeqGene on chromosome 1 | CTCTCTTTGCCTGTG |
| | | CCTTCCATAGAATAA |
| SEQ ID | GI 343488501 NG_029726 | GCCACATTCTCTAAG |
| NO: 478 | Homo sapiens dynamin 1 | GAAGAACACAGCAGA |
| | (DNM1), RefSeqGene on chromosome 9 | ACAATAGCATCTGTT |
| | | TTGTTTCTGCATGGC |
| SEQ ID | GI 335334929 NG_012849 | TTTTAAGGGAAGCCA |
| NO: 479 | Homo sapiens phosphoinositide-3- | GTGGCAGATGGAGAG |
| | kinase regulatory subunit 1 | CCATCAGATGAAACT |
| | (PIK3R1), RefSeqGene on chromosome 5 | GTTATTAATCACACC |
| SEQ ID | GI 237874184 NG_012166 | ATCAGTCATTCAGGA |
| NO: 480 | Homo sapiens T-box 21 | GGGTCTTACTGAAAG |
| | (TBX21), RefSeqGene on chromosome 17 | CTCTCATGTTTCCCC |
| | | AAAAGTAGTGAAGGA |
| SEQ ID | ref\|NG_029387.2\| | CGATCTCTGTCACAA |
| NO: 481 | Homo sapiens V-set pre-B cell | CTGTTCAATTCTGTC |
| | surrogate light chain 1 | CTAGTAGCAAGAAAG |
| | (VPREB1), | CAGCCACAGACAAAC |
| SEQ ID | GI 219521908 NG_009245 | GACGCAGGTTGGCAA |
| NO: 482 | Homo sapiens bone morphogenetic | CTAGATGTGACGGGG |
| | protein receptor type 1B | CACAACAAGGTAGGA |
| | (BMPR1B), RefSeqGene on chromosome 4 | GGGGTTTTTTGGTGT |
| SEQ ID | GI 254826724 NG_012488 | ACCACAGCTTAACAA |
| NO: 483 | Homo sapiens prostaglandin E synthase 2 | CATAGATTCTGAAAT |
| | (PTGES2), RefSeqGene on chromosome 9 | CAGCGATCTGGGTTT |
| | | GAGGTGTGATTCACC |
| SEQ ID | GI 256600243 NG_012682 | GGACAGCTAGAAAAC |
| NO: 484 | Homo sapiens versican | ACAAAATCTTGTAGG |
| | (VCAN), RefSeqGene on chromosome 5 | TCATTGCACCTATCT |
| | | CAGCCATAGGTGCAG |
| SEQ ID | GI 68165954 DQ086801 | TTTCCATTCTACAGA |
| NO: 485 | Homo sapiens suppressor of | AGGGAAAACTGAGTA |
| | cytokine signaling 1 | AATCTGCCTGTGGCC |
| | (SOCS1) gene, complete cds | ATTCCTGTCAAAGAC |
| SEQ ID | GI 117606467 EF064708 | CAAGGATTGACAGCC |
| NO: 486 | Homo sapiens tumor necrosis factor | ATCATCAGAAGCTCG |
| | (ligand) family, member 10 | GAAGAAACAAGGAAG |
| | (TNFSF10) gene, complete cds | GATTGATTCTATGCA |
| SEQ ID | GI 83699688 DQ323999 | TCATGAAACGAGATT |
| NO: 487 | Homo sapiens TNF receptor-associated factor 4 | CAAAGAAAGGCTGCG |
| | (TRAF4) gene, complete cds | ACTTGCCCAGGGTCA |
| | | CATAGTTACTTAAAG |
| SEQ ID | GI 300244503 NG_023318 | GGCCAGACTGCCTGA |
| NO: 488 | Homo sapiens Fc fragment of IgG receptor lib | GTTCAAATCTAGTTC |
| | (FCGR2B), RefSeqGene on chromosome 1 | TACAGCATACCAACT |
| | | ATATGACCCAAGTGA |
| SEQ ID | GI 224809428 NG_011537 | ATGTTGTCCGTGGAA |
| NO: 489 | Homo sapiens myosin heavy chain 3 | ACAAACCAATTTCTA |
| | (MYH3), RefSeqGene on chromosome 17 | CAATGTCCGTGCAGT |
| | | CCTAAGCATTTTTCC |
| SEQ ID | GI 335334929 NG_012849 | ATTTTTCTCTCAGGC |
| NO: 490 | Homo sapiens phosphoinositide-3- | TAACCAAAACCATGT |
| | kinase regulatory subunit 1 | TGAAATGAAAACCAC |
| | (PIK3R1), RefSeqGene on chromosome 5 | CTTGGAACTGGCCTT |
| SEQ ID | GI 291045304 NG_016710 | CTAGGAGACCTTATG |
| NO: 491 | Homo sapiens ribose 5-phosphate isomerase A | TTCTGCTTGTAGGCT |
| | (RPIA), RefSeqGene on chromosome 2 | GAAGGTAGATGTTGC |
| | | TAATCACAGCACTGT |
| SEQ ID | GI 343962631 NM_002037 | CGAAAAGATGCTGAG |
| NO: 492 | Homo sapiens FYN proto-oncogene, | CGACAGCTATTGTCC |
| | Src family tyrosine kinase | TTTGGAAACCCAAGA |
| | (FYN), transcript variant 1, mRNA | GGTACCTTTCTTATC |
| SEQ ID | GI 807201065 NM_001008397 | GTGTCATACATATTG |
| NO: 493 | Homo sapiens glutathione peroxidase 8 | CCTTGAAAGAAAGGA |
| | (putative) | CATTCAGGTGTCCCT |
| | (GPX8), transcript variant 1, mRNA | TCGGGGTTCTGTAAC |
| SEQ ID | GI 297374833 NM_006184 | CCAACAGGTTTAACC |
| NO: 494 | Homo sapiens nucleobindin 1 | CCAAGACCTTCTTCA |
| | (NUCB1), mRNA | TACTGCATGATATCA |
| | | ACAGTGATGGTGTCC |
| SEQ ID | GI 209862906 NM_006475 | ATATCGTACAGCTGT |
| NO: 495 | Homo sapiens periostin | CTGCATTGAAAATTC |
| | (POSTN), transcript variant 1, mRNA | ATGCATGGAGAAAGG |
| | | GAGTAAGCAAGGGAG |
| SEQ ID | GI 31559177 AY309922 | TTAGTGGTATTCACT |
| NO: 496 | Homo sapiens BH3 interacting domain death agonist | GTGTATGTGACACAC |
| | (BID) gene, complete cds | CAGCATGGGTTAGTG |
| | | GTATTCCTCCATGAT |
| SEQ ID | GI 224282141 NG_009873 | CTCTTCCTCCCCTTC |
| NO: 497 | Homo sapiens CREB binding protein | TTAAACACGAACAGG |
| | (CREBBP), RefSeqGene on chromosome 16 | CTAAATTGTCCATTT |
| | | CTCCAGCAGTTTTGA |
| SEQ ID | GI 209870110 NM_013943 | TCTCACTCATTGCAC |
| NO: 498 | Homo sapiens chloride intracellular channel 4 | TTCCTGGAGTTAAAT |
| | (CLIC4), mRNA | TTTCCAACAGCCATG |
| | | TTGAGGAATAGCACT |
| SEQ ID | GI 156142193 NM_005880 | CTATGCCCATCTTAT |
| NO: 499 | Homo sapiens DnaJ heat shock protein family | AGTCTTGGAAGACAA |
| | (Hsp40) member A2 | AAGGCTGGTAGAGAC |
| | (DNAJA2), mRNA | AGTCTTCAGTGGCTT |
| SEQ ID | GI 1073857156 NM_016930 | ACCTCCAGGAACTGT |
| NO: 500 | Homo sapiens syntaxin 18 | AAACAGGAACACCTA |
| | (STX18), transcript variant 1, mRNA | TGTGTAACTGAAGGC |
| | | ATGAGACATCTGTAC |
| SEQ ID | GI 1002095861 NG_046750 | GATGTCATTCACAAG |
| NO: 501 | Homo sapiens cytochrome c oxidase subunit 8A | TATAAGCCTTGGAGG |
| | (COX8A), RefSeqGene on chromosome 11 | CGGAACATAACTCGA |
| | | AGAAGAGCCCTTTTG |
| SEQ ID | GI 584593316 NG_033952 | AGGAAGCAAGACGTA |
| NO: 502 | Homo sapiens mitogen-activated | AAGAATTTTCATCCC |
| | protein kinase kinase 4 | GTATCACAGTGTTTT |
| | (MAP2K4), RefSeqGene on chromosome 17 | TATTGCTCGCCCAGA |
| SEQ ID | GI 654825134 NG_008781 | CTCCTATGACCACTG |
| NO: 503 | Homo sapiens poliovirus receptor | TCTATGTAAACACCC |
| | (PVR), RefSeqGene on chromosome 19 | CACTTTTTCTACACT |
| | | GGTTCTCCTAGGCAC |
| SEQ ID | GI 323276689 NG_028137 | TCATTTTTCAGTGGA |
| NO: 504 | Homo sapiens secretory leukocyte | GGTAGCTGAAGTTCA |
| | peptidase inhibitor | AAGAGGTTCAGTGAT |
| | (SLPI), RefSeqGene on chromosome 20 | TTGCTTCCAACCTGT |
| SEQ ID | GI 187761339 NM_130767 | GTAGATATGTTTAAG |
| NO: 505 | Homo sapiens acyl-CoA thioesterase 12 | TTCCGGGGACCATCT |
| | (ACOT12), mRNA | ACAGTTGGAGATCGT |
| | | CTTGTCTTCACTGCC |
| SEQ ID | GI 1028908926 NG_050619 | CAAAGCAGGTTCCTG |
| NO: 506 | Homo sapiens fatty acid binding protein 7 | ATTCCCAGCTTCCCA |
| | (FABP7), RefSeqGene on chromosome 6 | ATTATGTAGAGATAA |
| | | CTGTTGCCTTAGCAG |
| SEQ ID | GI 221316601 NM_001143935 | GCCTTTACATCTTTT |
| NO: 507 | Homo sapiens carnitine O-octanoyltransferase | GGCAAAAAGCTAACC |
| | (CROT), transcript variant 1, mRNA | AAGAACAAGATGCTT |
| | | CACCCGGATACGTTT |
| SEQ ID | GI 966209818 NM_014031 | CATTTCTCGAGTGAA |
| NO: 508 | Homo sapiens solute carrier family 27 member 6 | TGCAAAAAATCCCTT |
| | (SLC27A6), transcript variant 1, mRNA | CTTTGGCTATGCTGG |
| | | GCCTTATAAGCACAC |
| SEQ ID | GI 166795291 NG_007376 | CATCGTATTCATCCT |
| NO: 509 | Homo sapiens amyloid beta precursor protein | GAGAAAGGGAAACCT |
| | (APP), RefSeqGene on chromosome 21 | AAAGACTTGGGAGAG |
| | | TGTTCTGGGAGGAAA |
| SEQ ID | GI 212549702 NG_008951 | AATGCCCCCCTTAGT |
| NO: 510 | Homo sapiens ATR serine/threonine kinase | TCTGGGAAAGGGGAA |
| | (ATR), RefSeqGene on chromosome 3 | GAAATAGTGTTACTA |
| | | GAACCTGATTGAGAG |
| SEQ ID | GI 224809308 NG_011502 | TAGTTACAGGAAGGT |
| NO: 511 | Homo sapiens cytotoxic T-lymphocyte | AATTTGGCATGCAGC |
| | associated protein 4 | CACTATTTTTGAGTT |
| | (CTLA4), RefSeqGene on chromosome 2 | GATGCAAGCCTCTCT |
| SEQ ID | GI 429535868 NG_033017 | TGGAAACACTGTCTT |
| NO: 512 | Homo sapiens membrane bound | CTCTTGCCGTTGTTT |
| | transcription factor peptidase, site 1 | TCCTCTCTCCAGTGT |
| | (MBTPS1), RefSeqGene on chromosc | TATATCAAGTGAGGA |
| SEQ ID | GI 480355034 KC485577 | AAAAATCAAAACCGC |
| NO: 513 | Homo sapiens bone morphogenenic protein-5 | AATAAATCCAGCTCT |
| | (BMP5) mRNA, complete cds | CATCAGGACTCCTCC |
| | | AGAATGTCCAGTGTT |
| SEQ ID | GI 2909349 Y12863 | GAACAGCAGATCAGG |
| NO: 514 | Homo sapiens mRNA for growth factor FIGF | GCTGCTTCTAGTTTG |
| | | GAGGAACTACTTCGA |
| | | ATTACTCACTCTGAG |
| SEQ ID | GI 727346118 NM_002728 | AAGATGAAACTCCCC |
| NO: 515 | Homo sapiens proteoglycan 2, pro | TTACTTCTGGCTCTT |
| | eosinophil major basic protein | CTATTTGGGGCAGTT |
| | (PRG2), transcript variant 1, mRNA | TCTGCTCTTCATCTA |
| SEQ ID | GI 998614224 NM_001320340 | TGTAAGTGACTTACT |
| NO: 516 | Homo sapiens small VCP interacting protein | TCCAGGGAATCATGC |
| | (SVIP), transcript variant 1, mRNA | CCTATTTCTACCAGC |
| | | AGGTCATACCCAAAT |
| SEQ ID | GI 767172199 NG_042051 | GTGGATGATAAAATC |
| NO: 517 | Homo sapiens kelch like family member 41 | TATGTAGTTGCAGGC |
| | (KLHL41), RefSeqGene on chromosome 2 | AAAGACCTTCAAACA |
| | | GAGGCTTCGCTGGAT |
| SEQ ID | GI 1024846756 NG_047011 | AAGATATTGGGGAGG |
| NO: 518 | Homo sapiens mannose receptor C-type 1 | GGAAGTATTTCGTAG |
| | (MRC1), RefSeqGene on chromosome 10 | TCCTATGATGGGGAC |
| | | TCTGACTTTTAGGGA |
| SEQ ID | GI 224809264 NG_011470 | ACTGTCCCACTACTC |
| NO: 519 | Homo sapiens nitric oxide synthase 2 | TTGGGACAATTTAAT |
| | (NOS2), RefSeqGene on chromosome 17 | GAGATCAGATGTGAA |
| | | GAGCACTCAACCCTT |
| SEQ ID | GI 506949355 NM_199229 | GAATGCTAACACTTA |
| NO: 520 | Homo sapiens ribulose-5-phosphate-3-epimerase | AGCACAGACTAGAGC |
| | (RPE), transcript variant 1, mRNA | TTGCTTGGGTTTCTT |
| | | CCTGCATTACAAGGT |
| SEQ ID | GI 28372408 AY228337 | TTCCAAGGCAACTGC |
| NO: 521 | Homo sapiens TNF receptor-associated factor 6 | CCTTCATACATCAAC |
| | (TRAF6) gene, complete cds | TGAGTGATACATCTC |
| | | TTCCCTCTTGTAGTT |
| SEQ ID | GI 75113052b NG_U4183U | GTCCCTCTTCCTGGA |
| NO: 522 | Homo sapiens DnaJ heat shock protein family | AGCTACTTTCCTAGC |
| | (Hsp40) member C3 | TGTCTGCATGGTGAG |
| | (DNAC3), RefSeqGene on chromosome | TTCCTCATTTTTTTC |
| SEQ ID | GI 970414659 NG_013325 | TGAGATGACAAACTC |
| NO: 523 | Homo sapiens mitogen-activated protein kinase 10 | TATCTAGCCTGGTTT |
| | (MAPK10), RefSeqGene on chromosome 4 | GAGCTCTGTGAATTG |
| | | CTTCAGGAGGTTCTT |
| SEQ ID | GI 340138935 NG_029446 | GGAAATGGAGATTCT |
| NO: 524 | Homo sapiens PYD and CARD domain containing | GGAAGGATAAAGGCC |
| | (PYCARD), RefSeqGene on chromosome 16 | AGTGAGAAGGCATGA |
| | | TAAACATCCATGAGC |
| SEQ ID | GI 167555126 NM_005582 | CTCAGCTAGAACTCC |
| NO: 525 | Homo sapiens CD180 molecule | TCGATTTGGCATTTA |
| | (CD180), mRNA | CCCGCTTACACATTA |
| | | ATGCTCCACAAAGTC |
| SEQ ID | GI 58802450 AY916056 | ACACAACCAAGGGAG |
| NO: 526 | Homo sapiens flavin containing monooxygenase 2 | AAAACTATTCTGTCA |
| | (FMO2) gene, complete cds | AAGAGACGGTGCCAA |
| | | AAGGCAAAAACAAAG |
| SEQ ID | GI 319803083 NG_011853 | GGGTTGAAGAGTAGA |
| NO: 527 | Homo sapiens galactosylceramidase | GGAGGGATTTGAGAG |
| | (GALC), RefSeqGene on chromosome 14 | CTATTGAGGATATCT |
| | | TGGTGACTGAGGGTA |
| SEQ ID | GI 350276269 NG_030323 | TGAGTAGGTGAAACA |
| NO: 528 | Homo sapiens sialic acid | GGAAATACTCAATTT |
| | binding ig like lectin 11 | CCAGATCCTCTTGTG |
| | (SIGLEC11), RefSeqGene on chromosome 19 | CATCCTCCTTGCTCT |
| SEQ ID | GI 574584717 NM_001289177 | TTGCAATAAGTGAAA |
| NO: 529 | Homo sapiens acyl-CoA synthetase | TGCTGCTCTAGGTAG |
| | bubblegum family member 2 | AAGCTCTCCCTGCTG |
| | (ACSBG2), transcript variant 1, mRNA | TTTTTAAGAAGCCAC |
| SEQ ID | GI 189909140 EU779708 | GCAAGTCTAAAGTGA |
| NO: 530 | Homo sapiens protein tyrosine phosphatase-2 | CCCATGTTATGATTC |
| | (PTPN11) mRNA, complete cds | GCTGTCAGGAACTGA |
| | | AATACGACGTTGGTG |
| SEQ ID | GI 406737 X75342 H. sapiens SHB mRNA | ATGACAGAATTTCAG |
| NO: 531 | | AGGCAGGAAAGTGTC |
| | | CGGTCCCAGCATAAA |
| | | GGTATCCAGTTATAT |
| SEQ ID | GI 117606555 EF064752 | ATGCACAGAAGACAT |
| NO: 532 | Homo sapiens CD5 molecule | CCCAGCTCATAAATG |
| | (CD5) gene, complete cds | TACCTTGCAAAGTCT |
| | | TATTTCCCACCCAAT |
| SEQ ID | GI 577019603 NG_033914 | TCAGACTTCTGAGGA |
| NO: 533 | Homo sapiens CD207 molecule | TGGGAGTAAGCCAGA |
| | (CD207), RefSeqGene on chromosome 2 | CAAGGTATCTAGTCA |
| | | GGAATAGGGAAGTTG |
| SEQ ID | GI 430727969 NG_033033 | ACAGCTCTCCCCACC |
| NO: 534 | Homo sapiens ISG15 ubiquitin-like modifier | CTTTGGGAAATTAAC |
| | (ISG15), RefSeqGene on chromosome 1 | TTCTAGGAAAAGAAA |
| | | AAGAGACACAGTTGC |
| SEQ ID | GI 346227162 NG_029971 | CACAAACCTTACAGA |
| NO: 535 | Homo sapiens RELA proto-oncogene, NF-kB subunit | AGGAATAGCAGAGCA |
| | (RELA), RefSeqGene on chromosome 11 | AGATCACATCTCCAC |
| | | CACTGTCCTCAGTTA |
| SEQ ID | GI 353249890 NG_030362 | GAGACAGAAGAATGC |
| NO: 536 | Homo sapiens secreted phosphoprotein 1 | CAGACCCCAGAGGAC |
| | (SPP1), RefSeqGene on chromosome 4 | CTCATGTTATGTAAG |
| | | AAATAGCAATCACCT |
| SEQ ID | GI 257467583 NG_012852 | GCCAATGCCCCTGAG |
| NO: 537 | Homo sapiens signal transducer | ATTAAATGCTGATCC |
| | and activator of transcription 4 | CCATTAGATCTACAC |
| | (STAT4), RefSeqGene on chromosome 2 | ATGTTCAGCTTTCTT |
| SEQ ID | GI 283837929 NG_016244 | CCTCCTCCTCAAAGC |
| NO: 538 | Homo sapiens toll like receptor 5 | CTCACATGAATCTTC |
| | (TLR5), RefSeqGene on chromosome 1 | TTTGAGGTACTCTCT |
| | | GATGCTTCACTCTTC |
| SEQ ID | GI 17059625 AJ420108 | CCCCAGGACTTTATC |
| NO: 539 | Homo sapiens mRNA for F-box only 32 | AACTTGTTCAAGTTC |
| | (FBXO32 gene) | TGAATCCCAGCACAT |
| | | GACAACACTTCAGAA |
| SEQ ID | GI 262331528 NG_013342 | ACTGTTACTGAACAT |
| NO: 540 | Homo sapiens dihydrolipoamide | ACCTTTCAGTTCTCT |
| | S-acetyltransferase | CCTTCTAGGATGCTG |
| | (DLAT), RefSeqGene on chromosome 11 | TTTGGGCTTTCCTGT |
| SEQ ID | GI 190358513 NG_008045 | GTGGTTGCCCCATAT |
| NO: 541 | Homo sapiens dihydrolipoamide dehydrogenase | TCTGCCTTCTGATCC |
| | (DLD), RefSeqGene on chromosome 7 | TTAACCAATAAAACT |
| | | TGGCTTTTGTTTCCC |
| SEQ ID | GI 574997036 NG_033896 | CTGCCTCTCTGAATC |
| NO: 542 | Homo sapiens tubulin beta 4A class IVa | TTTTCCGCAACTCGC |
| | (TUBB4A), RefSeqGene on chromosome 19 | CTCTTACTTCCATTT |
| | | TACAGGTGAGAAAAC |
| SEQ ID | GI 225579089 NG_011672 | CACCTCTTAATTTCC |
| NO: 543 | Homo sapiens decorin | TGCCTGTGTCTTGTG |
| | (DCN), RefSeqGene on chromosome 12 | TGGTTGCATCTACTT |
| | | CAGACCAAAAGACAA |
| SEQ ID | GI 117606581 EF064765 | TGGGATCCAGACTAC |
| NO: 544 | Homo sapiens chemokine | TTTAGCCCATTTAAC |
| | (C-C motif) ligand 21 | CCTTTGAAGTCAAGG |
| | (CCL21) gene, complete cds | AATAAGTCTCCTGGG |
| SEQ ID | GI 1800224 U70065 Human JAK3 gene, complete cds | CCAAATGGTTAAACC |
| NO: 545 | | CTGTCTCCACTGTAA |
| | | ATATGTAACTCAGCT |
| | | GGGCATGGTAATGGG |
| SEQ ID | GI 329665040 NG_028340 | CAAGTAGTGGGGGAC |
| NO: 546 | Homo sapiens granzyme B | TCCTTCACCCACTAG |
| | (GZMB), RefSeqGene on chromosome 14 | ACTGTGATATTTCTC |
| | | TCTGGAAAGAGAAGA |
| SEQ ID | GI 342307060 NG_029601 | TCTTTTACCTGCTGC |
| NO: 547 | Homo sapiens Pim-1 proto-oncogene, | TTCTCCAAAAATCTG |
| | serine/threonine kinase | CCTGGGTTTTGTTCC |
| | (PIM1), RefSeqGene on chromosome 6 | CTATTTTTCTCTCCT |
| SEQ ID | GI 291084831 NG_016755 | TCAGTGGTTTCCTTC |
| NO: 548 | Homo sapiens succinate-CoA ligase alpha subunit | TTGATCTCTCTTATT |
| | (SUCLG1), RefSeqGene on chromosome 2 | TTCTCCAACCACCCC |
| | | CCTTTACTCTTAGGC |
| SEQ ID | GI 1040975354 NM_001737 | CACCAGCCACGTGCA |
| NO: 549 | Homo sapiens complement C9 | CAGCAGTTGCTTTTA |
| | (C9), mRNA | CTAGTCTTAGCTCTA |
| | | CGATTTAAATCCATG |
| SEQ ID | GI 55775471 NM_004271 | AGATGTAATGAAGTC |
| NO: 550 | Homo sapiens lymphocyte antigen 86 | CCCGAATGTATCTGT |
| | (LY86), mRNA | TTCTAAGGAGCCTCT |
| | | TGGCAGTCCTTAAGC |
| SEQ ID | GI 374252456 NM_001252406 | GAATAATCCCCACTC |
| NO: 551 | Homo sapiens zinc finger and BTB domain containing 7B | TGCTCTTAGGATTGA |
| | (ZBTB7B), transcript variant 3, mRNA | ATCCACCCCCATTCT |
| | | GTACATAGCCTCTTC |
| SEQ ID | GI 21655314 AY124010 | TTGGAGGGTCTCTCA |
| NO: 552 | Homo sapiens interleukin 1 receptor, type II | TGGCTGTTACAACTT |
| | (IL1R2) gene, complete cds | TCATGTAGAAGGGCC |
| | | ACACATATAACTCAT |
| SEQ ID | ref\|NG_008776.1\| | ACACATAGTCGAAAT |
| NO: 553 | Homo sapiens ciliary neurotrophic factor | TATAAGTCCCAGGTT |
| | (CNTF), RefSeqGene on | TGTTAGGAAGCTAAA |
| | | GGAAGGAGAGGGGCC |
| SEQ ID | GI 227496937 NG_011931 | GCTGAACAGAGTAGT |
| NO: 554 | Homo sapiens cholinergic receptor | CACCCGCTTGCCATA |
| | nicotinic alpha 4 subunit | TGAGAATCTTTTAAT |
| | (CHRNA4), RefSeqGene on chromosome 20 | TTGTGCCTCAGAAGG |
| SEQ ID | GI 1143077144 NG_052854 | TAAAATGGCCTTCAA |
| NO: 555 | Homo sapiens gem nuclear organelle associated protein 5 | TTGTGGTTGTGCAGC |
| | (GEMIN5), RefSeqGene on chromosome 5 | AGAATCAGCTGGAGA |
| | | GTCTTTGGAAAAATG |
| SEQ ID | GI 207444685 NG_008651 | ATGACTGATTTAGCA |
| NO: 556 | Homo sapiens NLRfamily pyrin domain containing 12 | AAACCATAATTCATC |
| | (NLRP12), RefSeqGene on chromosome 19 | CTCTGAGGCTTGTGA |
| | | AGGGGCAGGATTCAC |
| SEQ ID | GI 260593658 NG_013018 | GTAGCAGACAATTAT |
| NO: 557 | Homo sapiens glycogen phosphorylase, muscle associated | TGATGTTTGCTAGTT |
| | (PYGM), RefSeqGene on chromosome 11 | ATGGAAGGCGGGGCA |
| | | GAATTAGTCACCGTG |
| SEQ ID | GI 350606382 NG_030335 | TGATGAAGTGAGAAA |
| NO: 558 | Homo sapiens SEL1L ERAD E3 ligase adaptor subunit | AGAGAGCCTCAGGAT |
| | (SELIL), RefSeqGene on chromosome 14 | TCATTAGGGTGTTTT |
| | | CAGGCTTACATCCCT |
| SEQ ID | GI 1216866445 NM_005302 | TTTCCCAGTCCAATA |
| NO: 559 | Homo sapiens G protein-coupled receptor 37 | CTTTTCAAAGGGGTT |
| | (GPR37), mRNA | TTTCCCTCCATTGTG |
| | | TGTATTCTGTGGGAT |
| SEQ ID | GI 32891806 AY340485 | CTGGGGGAGACAGGA |
| NO: 560 | Homo sapiens biliverdin reductase B | TTTTGCAATTTTAAA |
| | (flavin reductase | CAGGACAGTCAAGAA |
| | (NADPH)) | AAGCTGCATGGAAAG |
| | (BLVRB) gene, complete cds | |
| SEQ ID | GI 117606545 EF064747 | TCCCTCTTGGAGGAA |
| NO: 561 | Homo sapiens class II, major | AAATAGAAGTAAGTT |
| | histocompatibility complex, transactivator | GTCTCAGGTCAGATT |
| | (CIITA) gene, complete cds | GTCTGGGAAGCCAAG |
| SEQ ID | GI 37654535 AY434089 | ACTCTCATTATTTCC |
| NO: 562 | Homo sapiens insulin-like growth | ATTGCATTTATGTTT |
| | factor binding protein 1 | CCCAGTTCAGCAGCT |
| | (IGFBP1) gene, complete cds | GCAGTTCCCACTGTA |
| SEQ ID | GI 310703611 NG_027845 | GAGTGTCTGTGAACC |
| NO: 563 | Homo sapiens clusterin | AGGTCCGTTCTGTCC |
| | (CLU), RefSeqGene on chromosome 8 | ACTGAGCTGTACTTA |
| | | CGTCTAGATGTATAA |
| SEQ ID | GI 1150763505 NG_052952 | CTGCTAATGTGTATT |
| NO: 564 | Homo sapiens ezrin | TGAGCCTGAAATGCA |
| | (EZR), RefSeqGene on chromosome 6 | CATTGTCCCACCTTT |
| | | CCTCAATGGCAAAAT |
| SEQ ID | GI 293597500 NG_016966 | GGAATTCTGACCCTA |
| NO: 565 | Homo sapiens phosphoglucomutase 1 | AGTATCGTTCATGTT |
| | (PGM1), RefSeqGene on chromosome 1 | TCCTGACCCTTTTCT |
| | | GCCTCCTCATCTCTT |
| SEQ ID | GI 340805863 NG_029510 | AAATAGCTGAGGGTT |
| NO: 566 | Homo sapiens protein tyrosine kinase 2 beta | TAAAGCCACTTAGAC |
| | (PTK2B), RefSeqGene on chromosome 8 | TTCTAGCCAAGTCCT |
| | | GCTCCATCCTTACTG |
| SEQ ID | GI 1007399066 NG_029521 | AGCATACCTGAGACT |
| NO: 567 | Homo sapiens SGT1 homolog, MIS12 | AACCCTATGGTCTAA |
| | kinetochore complex assembly cochaperone | GAAGAACTTACGTTT |
| | (SUGT1), RefSeqGene c | GGAGTCCTGGGCTAA |
| SEQ ID | GI 1021312320 NM_001323565 | CATGATCCCCAGACC |
| NO: 568 | Homo sapiens cysteine dioxygenase type 1 | ACAACAAACCAAAAC |
| | (CD01), transcript variant 1, mRNA | ATAAACTCATGTCTG |
| | | TGTCCCATGGTCATA |
| SEQ ID | GI 572873826 NM_001130080 | ATTCTCAGGAACTCT |
| NO: 569 | Homo sapiens interferon alpha inducible protein 27 | CCTTCTTTGGGTCTG |
| | (IFI27), transcript variant 1, mRNA | GCTGAAGTTGAGGAT |
| | | CTCTTACTCTCTAGG |
| SEQ ID | GI 187423911 NM_003764 | TTGACAGAAGCCAAG |
| NO: 570 | Homo sapiens syntaxin 11 | TAAGGAACTGAAGTT |
| | (STX11), mRNA | GTATCTGACTGTAGG |
| | | GTGAATGTCTGAGGC |
| SEQ ID | GI 1036032362 AH002667 | GGGGTCGCAGATTGT |
| NO: 571 | Homo sapiens cytochrome P450 | GATAGACAGTCTTAC |
| | (CYP1A2) gene, complete cds | ATAGAGTGACATGGG |
| | | GTATAGAGGGGTATT |
| SEQ ID | GI 68248543 DQ096732 | AGTTTCAAATCAGAT |
| NO: 572 | Homo sapiens glutathione peroxidase 7 | GAAGGCGTGGATGCA |
| | (GPX7) gene, complete cds | CTTAGTAAACTGTAG |
| | | AGTGCTTTGCACCTG |
| SEQ ID | GI 262331531 NG_013343 | TTAAAGGACACTTGT |
| NO: 573 | Homo sapiens endothelin receptor type A | TGCTTCTCACGTGCA |
| | (EDNRA), RefSeqGene on chromosome 4 | GAAAACAAGGGCTGC |
| | | TTCTAGATAATCACC |
| SEQ ID | GI 582015216 NG_016002 | GGCTCTAGTGTCACC |
| NO: 574 | Homo sapiens G protein subunit alpha i2 | CTGTTGATTTCCTCT |
| | (GNAI2), RefSeqGene on chromosome 3 | GAAATGGTGAAGTTC |
| | | ATTTCCCTGTTTGTT |
| SEQ ID | GI 289802979 NG_016616 | CCTTACCATAATTCA |
| NO: 575 | Homo sapiens phosphorylase | GAGTCCAGAAGAGCA |
| | kinase catalytic subunit gamma 2 | CCTAAAGGAACTGGA |
| | (PHKG2), RefSeqGene on chromosome 16 | GATGTTGCACACTGA |
| SEQ ID | GI 167860125 NM_002639 | CTAGCAAATTCGGCT |
| NO: 576 | Homo sapiens serpin family B member 5 | TTTGCCGTTGATCTG |
| | (SERPINB5), mRNA | TTCAAACAACTATGT |
| | | GAAAAGGAGCCACTG |
| SEQ ID | GI 1657840 U73304 Human CB1 cannabinoid receptor | CCTCTGAGGATGATG |
| NO: 577 | (CNR1) gene, complete cds | TACTTGCCCTGACCA |
| | | TGCATTTTACCATCA |
| | | CACATGTTCAGAAAG |
| SEQ ID | GI 190570161 NG_008053 | TTGCCATGATACCAT |
| NO: 578 | Homo sapiens acyl-CoA synthetase | CGTGGAAATGAAAGA |
| | long chain family member 4 | CAACGTGAAAATCCT |
| | (ACSL4), RefSeqGene on chromosome X | GCGTCCTTGTGATAT |
| SEQ ID | GI 238018073 NG_012199 | GGTTCAAACAGTGTA |
| NO: 579 | Homo sapiens ketohexokinase | CAGGTTCTAGGGTCC |
| | (KHK), RefSeqGene on chromosome 2 | TGTCTAGCTTTATGA |
| | | ACAGGAGCAAATCCT |
| SEQ ID | GI 402232739 NM_024295 | GACTGTTAGGAGCAG |
| NO: 580 | Homo sapiens derlin 1 | TATTGAGTGGCTGTC |
| | (DERL1), transcript variant 1, mRNA | ACACTTTGAGGCAAC |
| | | TAAAAAGGCTTCAAA |
| SEQ ID | GI 16118554 AF398885 | GAGGTGCTTGAACTC |
| NO: 581 | Homo sapiens ELMOl mRNA, complete cds | GCTTTCTCCATCTTG |
| | | TATGACTCAAACTGC |
| | | CAACTGAACTTCATC |
| SEQ ID | GI 194018739 NG_008192 | CTGGCTCTTCTTAAC |
| NO: 582 | Homo sapiens CD36 molecule | TTTCTCTGCTCTCTC |
| | (CD36), RefSeqGene on chromosome 7 | CTTATTTGGATGGTA |
| | | GGTTTGACACAGGCT |
| SEQ ID | GI 170763484 NG_007481 | CAAATCGAGAGCTGT |
| NO: 583 | Homo sapiens complement C3b/C4b receptor 1 | TCTGCCTCATGACCC |
| | (Knops blood group) | ACTAATGAGAATAAG |
| | (CR1), RefSeqGene on chromosome 1 | TGGGATGTCAGAGAG |
| SEQ ID | GI 207438642 NG_008645 | AGGGAAGATGTTAGT |
| NO: 584 | Homo sapiens dopamine beta-hydroxylase | ATCTGTACCACCCTC |
| | (DBH), RefSeqGene on chromosome 9 | TTGGTTTGATCAGAA |
| | | AGGGCAATGCATGTA |
| SEQ ID | GI 299782605 NG_023187 | AGAGATTGTGTGACT |
| NO: 585 | Homo sapiens major histocompatibility | TGGTTTAAAAAAACA |
| | complex, class 1, B | CGGAACCCAACCATA |
| | (HLA-B), RefSeqGene on chromosome 6 | CGCTCTTTCCAGACA |
| SEQ ID | GI 332164677 NG_028910 | TTTGTGTCTATGCTA |
| NO: 586 | Homo sapiens nuclear receptor subfamily | CCAGAAGGAGGAGAG |
| | 4 group A member 3 | GATGACACTTCCTCT |
| | (NR4A3), RefSeqGene on chromosome 9 | CTGTTTCCCAGATTA |
| SEQ ID | GI 291084846 NG_016762 | GCTCACCTCCCAAGT |
| NO: 587 | Homo sapiens pyruvate dehydrogenase kinase 3 | TTCATGGCTGCAATT |
| | (PDK3), RefSeqGene on chromosome X | CTCTCTGATCTTCAT |
| | | CAAGGATCTTCATTG |
| SEQ ID | GI 117606559 EF064754 | TTATGAAGGATCCAA |
| NO: 588 | Homo sapiens CD40 molecule, TNF | GACTTTCATCTTTGA |
| | receptor superfamily member 5 | ATCCCCTACCCTAAA |
| | (CD40) gene, complete cds | GCCTGGCCTGATCAT |
| SEQ ID | GI 345441766 NG_029866 | AAGTGAGCTCATAAC |
| NO: 589 | Homo sapiens DnaJ heat shock protein family | CTGCCATGGGCAAGT |
| | (Hsp40) member A3 | TTTATATCAGGTAGT |
| | (DNAJA3), RefSeqGene on chromosome | GTACACAGGTGAGAG |
| SEQ ID | GI 110349787 NM_018489 | TTAAAATGGGAGGTG |
| NO: 590 | Homo sapiens ASH1 like histone | CTTCTGATGTATCTA |
| | lysine methyltransferase | CCGCTAAATCCCCAT |
| | (ASHIL), mRNA | TCAGTGCAGTAGGAG |
| SEQ ID | GI 95147553 NM_003956 | TGGATGGTGTTGACT |
| NO: 591 | Homo sapiens cholesterol 25-hydroxylase | TCTGACTCTAAAAGC |
| | (CH25H), mRNA | AATCAAACATGTTTC |
| | | TGCTGGACAGTGACC |
| SEQ ID | GI 60391308 D50017 | ACCTCTGCTGGACTC |
| NO: 592 | Homo sapiens PDGFRA gene for alpha- | ATGAATTCAGGTATT |
| | platelet-derived growth factor receptor, | TCTGGGAGGTTCTGG |
| | complete cds | GTTACTCTAGAGTAG |
| SEQ ID | GI 974987497 NG_011800 | TGTCCTGTATGTGGG |
| NO: 593 | Homo sapiens ceruloplasmin | AGTAGTGACAAAACA |
| | (CP), RefSeqGene on chromosome 3 | GCACATGGTGTGATA |
| | | GAATGAGATGGACTG |
| SEQ ID | GI 1150561155 NG_052944 | AATGCAGCTGAGAGA |
| NO: 594 | Homo sapiens TNF superfamily member 12 | TCACATGAAATGAGA |
| | (TNFSF12), RefSeqGene on chromosome 17 | ACAGAGAAATGATGG |
| | | CTGGGTTTGGTAACG |
| SEQ ID | GI 927669118 NM_001166693 | GGTTGATTCAATGCC |
| NO: 595 | Homo sapiens AF4/FMR2 family member 1 | TTGGGAACTATTTTT |
| | (AFF1), transcript variant 1, mRNA | GCACATTGGAAGCCT |
| | | CAAAAACAGTCCAGA |
| SEQ ID | GI 29542 X06596 Human mRNA for | GAATGGTAAAGTTGA |
| NO: 596 | complement component Cls | AGACCCAGAGAGCAC |
| | | TTTGTTTGGTTCTGT |
| | | CATCCGCTACACTTG |
| SEQ ID | GI 728797213 LN680437 | TTACACCTTTGATGG |
| NO: 597 | Homo sapiens mRNA for CD47 | AGCTCTAAACAAGTC |
| | | CACTGTCCCCACTGA |
| | | CTTTAGTAGTGCAAA |
| SEQ ID | GI 20147702 AF493905 | AATTATTGCTATCAT |
| NO: 598 | Homo sapiens guanine nucleotide | TAGGGCTATGGGGAG |
| | binding protein alpha il | GTTGAAGATAGACTT |
| | (GNAIl) mRNA, complete cds | TGGTGACTCAGCCCG |
| SEQ ID | GI 169790829 NM_001754 | GTCCAGTTCTTCCCC |
| NO: 599 | Homo sapiens runt related transcription factor 1 | CTTCACATAAAGGAA |
| | (RUNX1), transcript variant 1, mRNA | CATGGTTTGTCAGCC |
| | | TTTCTCCTGTTTATG |
| SEQ ID | GI 209977031 NG_008839 | CCCCAAAGCCTCTTC |
| NO: 600 | Homo sapiens 24-dehydrocholesterol reductase | TTCTTCAGGGAAAAC |
| | (DHCR24), RefSeqGene on chromosome 1 | ACCTTCAGTTCTTTT |
| | | AACTATTCCCATGGG |
| SEQ ID | GI 238028972 NG_011992 | AACTGGGACCTAGGA |
| NO: 601 | Homo sapiens nitric oxide synthase 3 | AAATGAGTCATCCTT |
| | (NOS3), RefSeqGene on chromosome 7 | GGTCATGCACATTTC |
| | | AAATGGTGGCTTAAT |
| SEQ ID | GI 545687789 NM_015901 | CAGACAGAAATCCAG |
| NO: 602 | Homo sapiens nudix hydrolase 13 | GTGAACTTGAGAGAA |
| | (NUDT13), transcript variant 1, mRNA | TTAGAGACAGCTGCC |
| | | TGGTTCAGTCATGAT |
| SEQ ID | GI 20303097 AF503166 | CAAAAGTGCAATGGA |
| NO: 603 | Homo sapiens xeroderma pigmentosum, | TTGCTTCTCATGAGC |
| | complementation group A | TTCCCGTTACTAGAA |
| | (XPA) gene, complete cds | GCGCTCAAATAGGAA |
| SEQ ID | GI 224809341 NG_011508 | CTGAATGAAAAGTGC |
| NO: 604 | Homo sapiens insulin like growth | TCCTAAAATCTTTCC |
| | factor binding protein 3 | TGTCCCCTTTTAAGA |
| | (IGFBP3), RefSeqGene on chromosome 7 | CTTCACTGGGCAGGG |
| SEQ ID | GI 1069415403 NG_032899 | AACTCCCATGTGCTA |
| NO: 605 | Homo sapiens protein C receptor | GGTAATGTATGAGGT |
| | (PROCR), RefSeqGene on chromosome 20 | GCCAGAGTTACCCAA |
| | | AAAACAAACAAAGCA |
| SEQ ID | GI 169790828 NM_002755 | CTTTCTTACCCAGAA |
| NO: 606 | Homo sapiens mitogen-activated | GCAGAAGGTGGGAGA |
| | protein kinase kinase 1 | ACTGAAGGATGACGA |
| | (MAP2K1), mRNA | CTTTGAGAAGATCAG |
| SEQ ID | GI 117606541 EF064745 | CTTCTAAGACCCTGG |
| NO: 607 | Homo sapiens chemokine | AAGACTCTTAGAAGT |
| | (C-X3-C motif) ligand 1 | CCTTGAGGTCCAGCC |
| | (CX3CL1) gene, complete cds | TAAAGGAGAATTCCT |
| SEQ ID | GI 1143077143 NG_052860 | CATCCTCGAGGTTTT |
| NO: 608 | Homo sapiens adiponectin receptor 1 | CATAGGCTTCCAGCT |
| | (ADIPOR1), RefSeqGene on chromosome 1 | TCCTGTTCTCCTTAG |
| | | CTCAATTGTTCACTA |
| SEQ ID | GI 347658933 NG_030027 | GTAAAGAGCAACACA |
| NO: 609 | Homo sapiens AT-rich interaction domain 5B | ATTCTTTGTAAAGCC |
| | (ARID5B), RefSeqGene on chromosome 10 | ATTGGCCCCACAGAA |
| | | AGCTCCATGGAAAAT |
| SEQ ID | GI 226492969 NG_011817 | TAGGAATTAGAGCCC |
| NO: 610 | Homo sapiens LIF receptor alpha | TCTCTGCAATATCAT |
| | (LIFR), RefSeqGene on chromosome 5 | CGTTGTTTTCCTGGC |
| | | ACAATGGGAGTGTAT |
| SEQ ID | GI 237858735 NG_012106 | CTTTATCTGTGGAAT |
| NO: 611 | Homo sapiens 8-oxoguanine DNA glycosylase | GGGATGGTAACTCAG |
| | (OGG1), RefSeqGene on chromosome 3 | CCCTCACAAGATGCT |
| | | ATGAGGAATGAGAGG |
| SEQ ID | GI 686223163 NG_034261 | CAGAGTTAGTGGTAC |
| NO: 612 | Homo sapiens primase | AGACTCTAGGGTTGT |
| | (DNA) subunit 2 | GGTTTCTTCACGGAA |
| | (PRIM2), RefSeqGene on chromosome 6 | CCTGTTTTAAGGCAT |
| SEQ ID | GI 305410826 NG_027551 | TGCCATCAAGGAGGC |
| NO: 613 | Homo sapiens transient receptor potential | CATCACCAGAAATTG |
| | cation channel subfamily M member 4 | ATTTTCTTCATGCTA |
| | (TRPM4), RefSeqGene or | CACATACTTCCATCC |
| SEQ ID | GI 307775406 NM_015364 | TCAACACCATGAATC |
| NO: 614 | Homo sapiens lymphocyte antigen 96 | TTCCAAAGCGCAAAG |
| | (LY96), transcript variant 1, mRNA | AAGTTATTTGCCGAG |
| | | GATCTGATGACGATT |
| SEQ ID | GI 375151559 NM_005651 | CAACATACCTGATTC |
| NO: 615 | Homo sapiens tryptophan 2,3-dioxygenase | CCCGACACTGGATAC |
| | (TD02), mRNA | CGAAGATGAACCCAA |
| | | CCATTCACAAATTTC |
| SEQ ID | GI 117606567 EF064758 | CCTGCCAAATATTCA |
| NO: 616 | Homo sapiens chemokine | TATACCTGTCCACTT |
| | (C-C motif) receptor 7 | GGGGTCATGAGGAGA |
| | (CCR7) gene, complete cds | TGCAAATGAAACGTG |
| SEQ ID | GI 410991940 NG_032977 | TTCAAGCTAGAACTC |
| NO: 617 | Homo sapiens interleukin 12 receptor subunit beta 2 | AAAACTCCATACTTG |
| | (IL12RB2), RefSeqGene on chromosome 1 | CCAGGTACACATGGT |
| | | CCTGTTTACCCATCT |
| SEQ ID | GI 238776809 NG_012246 | GATATTGGGACTGAG |
| NO: 618 | Homo sapiens N-acetyltransferase 2 | AGATAGGAGGCCAGG |
| | (NAT2), RefSeqGene on chromosome 8 | AGAAGGCCAAAGAAA |
| | | AACTGACTTCTGAAG |
| SEQ ID | GI 194018405 NG_008205 | ATGAAAGGATCGGAT |
| NO: 619 | Homo sapiens phosphoenolpyruvate carboxykinase 1 | GAAGGTCGTTGGTGA |
| | (PCK1), RefSeqGene on chromosome 20 | CTCACTGCTCTGACG |
| | | TTTTACTTGAACTAG |
| SEQ ID | GI 359279909 NM_020663 | GTCAAAGGCCATCTC |
| NO: 620 | Homo sapiens ras homolog family member J | ACATTTTACAAATCC |
| | (RHOJ), mRNA | CCAGCTCATGAACGT |
| | | GAAGCTGATAGGAAA |
| SEQ ID | GI 42519913 NM_012448 | GAGATTTTTGATGAA |
| NO: 621 | Homo sapiens signal transducer and | AGGTGTGCTCGCTCT |
| | activator of transcription 5B | CTGCGTTCTATCTTC |
| | (STAT5B), mRNA | TCTCTCCTCCTTGTT |
| SEQ ID | GI 48255965 NM_006759 | CTCTGACAATGAGTG |
| NO: 622 | Homo sapiens UDP-glucose pyrophosphorylase 2 | AAAAGCGGGAATTTC |
| | (UGP2), transcript variant 1, mRNA | CTACAGTGCCCTTGG |
| | | TTAAATTAGGCAGTT |
| SEQ ID | GI 117606505 EF064727 | TGGAGGAGAAGTGGA |
| NO: 623 | Homo sapiens inducible T-cell co-stimulator | TAGATTCTGTTGGAC |
| | (ICOS) gene, complete cds | ATAAAACAGAGGTGC |
| | | TGGAAATTAGGCGTT |
| SEQ ID | GI 269914179 NG_015979 | TCTCTCCTTTCATGG |
| NO: 624 | Homo sapiens nitric oxide synthase 1 adaptor protein | AATCTCCCTGTGCAA |
| | (NOSIAP), RefSeqGene on chromosome 1 | TAAAGGAAAGCTGAG |
| | | GACATTCTCCCATAC |
| SEQ ID | GI 557878734 NM_001995 | AAGGCATCACATTGC |
| NO: 625 | Homo sapiens acyl-CoA synthetase long chain family member 1 | ACCCTGAATTATTTT |
| | (ACSL1), transcript variant 1, mRNA | CTATCGACAATGGCC |
| | | TTCTGACTCCAACAA |
| SEQ ID | GI 68215223 NM_003965 | GTAGTCTTCCTTCTG |
| NO: 626 | Homo sapiens C-C motif chemokine receptor like 2 | ATGTGGGCGCCCTAC |
| | (CCRL2), transcript variant 1, mRNA | AATATTGCATTTTTC |
| | | CTGTCCACTTTCAAA |
| SEQ ID | GI 735367774 NM_000211 | AGGACTCCAGCAATG |
| NO: 627 | Homo sapiens integrin subunit beta 2 | TGGTCCATCTCATTA |
| | (ITGB2), transcript variant 1, mRNA | AGAATGCTTACAATA |
| | | AACTCTCCTCCAGGG |
| SEQ ID | GI 117606359 NM_015310 | GTACTGGACCAAGAT |
| NO: 628 | Homo sapiens pleckstrin and Sec7 domain containing 3 | GCTGTTTCTAGTTTT |
| | (PSD3), transcript variant 1, mRNA | TCAGTTCAGCAGGTG |
| | | GAAAAAGAGCTGGAC |
| SEQ ID | GI 960513892 NM_001317781 | AAAGAGCAAAGTCAG |
| NO: 629 | Homo sapiens sorting nexin 25 | GAAACAAAACAGAGA |
| | (SNX25), mRNA | GCACAGCAAAAGCTG |
| | | CTTGAAAACATTCCA |
| SEQ ID | GI 27979118 AY219866 | TCCTTATGCCTCAGA |
| NO: 630 | Homo sapiens caspase 3, apoptosis-related cysteine protease | GTGTCATTGGGAGGA |
| | (CASP3) gene, complete cds | CTCACGAAAATACGC |
| | | TTGTACTTTGAGTTC |
| SEQ ID | GI 32187528 AY324876 | GCAATAGCCCACAAT |
| NO: 631 | Homo sapiens lactoperoxidase | TCCTAAAGTCCTCAG |
| | (LPO) gene, complete cds | CCTGTACATCACCTG |
| | | AAAGAGGACATCTAA |
| SEQ ID | GI 263191400 NG_015828 | CAATCTGCACAGATG |
| NO: 632 | Homo sapiens glutamic-pyruvic transaminase | CTCTTCTGAAGTAGG |
| | (GPT), RefSeqGene on chromosome 8 | CATGATAGTCCCCAT |
| | | TTGATAGACGTGGAA |
| SEQ ID | GI 1015809840 NG_009004 | CACATTCCCCTTCTT |
| NO: 633 | Homo sapiens potassium voltage- | CCCACAGCCTCCTGT |
| | gated channel subfamily Q member 2 | GTAGGAAATCTTATG |
| | (KCNQ2), RefSeqGene on chromo [symbol] | GAAATTTCCCAAAAG |
| SEQ ID | GI 430768625 NG_033035 | AGATGTAGACTGGGG |
| NO: 634 | Homo sapiens kelch like family member 40 | AGGTTGACTGATAGC |
| | (KLHL40), RefSeqGene on chromosome 3 | CACCTACTTGAAGGT |
| | | TGAAGACAGTCAATA |
| SEQ ID | GI 1008909437 NG_023257 | CTGCATTCTATGTGC |
| NO: 635 | Homo sapiens lactotransferrin | AGGATGAAGAAAGAG |
| | (LTF), RefSeqGene on chromosome 3 | AAGGAGAAGAAAGGG |
| | | CAAAAGGCATGTACC |
| SEQ ID | GI 318064850 NG_028074 | CTCATGGGTCAATAC |
| NO: 636 | Homo sapiens ras related dexamethasone induced 1 | TACTGTTATTGTTGC |
| | (RASD1), RefSeqGene on chromosome 17 | TATTGTTATTACCAG |
| | | GCCCCGCCCTCCTAA |
| SEQ ID | GI 1030311320 NG_050664 | GGGCCTAAGAAGGAT |
| NO: 637 | Homo sapiens sirtuin 1 | GTGACATGTCCTATG |
| | (SIRT1), RefSeqGene on chromosome 10 | ATAAAGGACCAGGAG |
| | | TTTGGGATTTGAGAG |
| SEQ ID | GI 187761339 NM_130767 | TCAGTATCAAGGTCA |
| NO: 638 | Homo sapiens acyl-CoA thioesterase 12 | TGGTACAGGATATGC |
| | (ACOT12), mRNA | TCACTGGCATTGAGA |
| | | AGCTTGTTAGTGTGG |
| SEQ ID | GI 33413399 NM_001984 | GCAAAAAGCAATCAG |
| NO: 639 | Homo sapiens esterase D | CAATTGGACAGGAAA |
| | (ESD), mRNA | AGAATGGCATTGAAG |
| | | CAGATTTCCAGCAAC |
| SEQ ID | GI 42416963 AY534685 | GCTGGAGATTCTCAG |
| NO: 640 | Homo sapiens insulin-like growth | CCAGGGACTTGTGCA |
| | factor binding protein 5 | TCAGTGTGTATTTCC |
| | (IGFBP5) gene, complete cds | TATGTGTACAGTTAT |
| SEQ ID | GI 77744394 DQ230990 | TGCCAAGAGGAATGT |
| NO: 641 | Homo sapiens peroxiredoxin 6 | TAAGTTGATTGCCCT |
| | (PRDX6) gene, complete cds | TTCAATAGACAGTGT |
| | | TGAGGACCATCTTGC |
| SEQ ID | GI 224809245 NG_011450 | GTAGTTTGGGAACCC |
| NO: 642 | Homo sapiens interferon regulatory factor 1 | CTGACATATGACAAT |
| | (IRF1), RefSeqGene on chromosome 5 | GCCCCCTTAGATAAG |
| | | CTCAAGTTACAGGAA |
| SEQ ID | GI 584613557 NG_033959 | TTGTTTGAAGTGGAG |
| NO: 643 | Homo sapiens poly | AAGGATGGTGAGAAA |
| | (ADP-ribose) polymerase 2 | GAAGCCTTCAGAGAG |
| | (PARP2), RefSeqGene on chromosome 14 | GACCTTCATAACAGG |
| SEQ ID | GI 77702091 DQ217939 | GAAGACAGAAGGGCA |
| NO: 644 | Homo sapiens mannose-binding protein C | GTTTGTGGATCTGAC |
| | (MBL2) gene, complete cds | AGGAAATAGACTGAC |
| | | CTACACAAACTGGAA |
| SEQ ID | GI 225735572 NG_011717 | CCACAGTGATGGTTA |
| NO: 645 | Homo sapiens alpha-2-macroglobulin | AGAACGAGGACAGTC |
| | (A2M), RefSeqGene on chromosome 12 | TGGTCTTTGTCCAGA |
| | | CAGACAAATCAATCT |
| SEQ ID | GI 335334987 NG_029076 | ACAGTGGGAAGGCTG |
| NO: 646 | Homo sapiens C-X-C motif chemokine receptor 3 | AAAGTAAGACTGAAA |
| | (CXCR3), RefSeqGene on chromosome X | GGTAATTTGGGATCA |
| | | GGTGATGGTATTGGA |
| SEQ ID | ref\|NM_004420.2\|Homo sapiens dual | CTTCTGCTCCCGGCC |
| NO: 647 | specificity phosphatase 8 | CCTCCCTTTGTATTT |
| | (DUSP8), mRNA | GGAGACAATGTGTTG |
| | | TAATAAAGCTTAAAG |
| SEQ ID | GI 1042161084 NG_046982 | GGAAGAGAATGGATG |
| NO: 648 | Homo sapiens ficolin 1 | TTAAAAAATGCAAGG |
| | (FCN1), RefSeqGene on chromosome 9 | ATAGCCATTGGGTAG |
| | | AACGCCATACAGCCA |
| SEQ ID | GI 654825055 NG_028206 | TTTGGTGGAGAAGTG |
| NO: 649 | Homo sapiens prostaglandin-endoperoxide synthase 2 | GGTTTTCAAATCATC |
| | (PTGS2), RefSeqGene on chromosome 1 | AACACTGCCTCAATT |
| | | CAGTCTCTCATCTGC |
| SEQ ID | GI 341572552 NG_029517 | TAGTGCCATCAATGC |
| NO: 650 | Homo sapiens retinoid X receptor gamma | ACACAGGGACTTTTG |
| | (RXRG), RefSeqGene on chromosome 1 | GAGTCATTGTAGAGT |
| | | TATGCACTGTACAGA |
| SEQ ID | GI 325910849 NG_028199 | TGTGGCATGTTATCT |
| NO: 651 | Homo sapiens scavenger receptor class B member 1 | AAAGAGTAAAGGTAC |
| | (SCARB1), RefSeqGene on chromosome 12 | CATGCCTTTGCCTTT |
| | | CTGGGCCTTGAAATC |
| SEQ ID | GI 955654849 NM_001928 | AGCAATGAAGTCATC |
| NO: 652 | Homo sapiens complement factor D | CACTCCTGCATCTGG |
| | (CFD), transcript variant 1, mRNA | TTGGTCTTTATTGAG |
| | | CACCTACTATATGCA |
| SEQ ID | GI 50345287 AY682848 | ACCTTCTAATTATAG |
| NO: 653 | Homo sapiens receptor | CTTGGTCTTTCTGGT |
| | (TNFRSF)-interacting serine-threonine kinase 1 | TGCTAGCCCCCATTC |
| | (RIPK1) gene, complete cds | TGAAGTTGCCTAGTT |
| SEQ ID | GI 30039656 AY273786 | GAGAACCCAGGTCGT |
| NO: 654 | Homo sapiens tumor necrosis factor, | CTTTCTATTTTCAGG |
| | alpha-induced protein 2 | TCAGCTGATTAGCCA |
| | (TNFAIP2) gene, complete cds | CCTTAGTTCCATCTG |
| SEQ ID | GI 340805863 NG_029510 | TCTGTTTTTCCTGTC |
| NO: 655 | Homo sapiens protein tyrosine kinase 2 beta | TGATCCAGGAGCACA |
| | (PTK2B), RefSeqGene on chromosome 8 | CATTGCACTTAGCTG |
| | | TCATATCCCTTTAGT |
| SEQ ID | GI 506949355 NM_199229 | AAAGGATCTGGGAAG |
| NO: 656 | Homo sapiens ribulose-5-phosphate-3-epimerase | TGGTAGAATTTCTGG |
| | (RPE), transcript variant 1, mRNA | TCTGTACTTTTACAA |
| | | ATGGAGCCCTTGGGA |
| SEQ ID | GI 632794850 NM_002957 | GCCTGTCACTGCTCT |
| NO: 657 | Homo sapiens retinoid X receptor alpha | GCCTAAGAGATGTGT |
| | (RXRA), transcript variant 1, mRNA | TGTCACCCTCCTTAT |
| | | TTCTGTTACTACTTG |
| SEQ ID | GI 209447071 NM_005639 | GGCTGTTTCCCAGTA |
| NO: 658 | Homo sapiens synaptotagmin 1 | AAACTGGAATTCCTG |
| | (SYT1), transcript variant 1, mRNA | TCGTTACTGTTTCCT |
| | | TATCAAAGAAGGGGC |
| SEQ ID | GI 21397157 AF517525 | ACTGTATGAGGTAAG |
| NO: 659 | Homo sapiens cyclin D3 | GAGGTGGAAGTCAAT |
| | (CCND3) gene, complete cds | GGTCTAAAGCAGGGA |
| | | TCATTGAGCCTTTTC |
| SEQ ID | GI 94717615 DQ523828 | AGACATTCTGCTGGA |
| NO: 660 | Homo sapiens transglutaminase 2 | AGCTTGCACATATTA |
| | (C polypeptide, protein-glutamine- | GCTCAGTTAATCCTC |
| | gamma-glutamyltransferase) | ACAAGAACCCTCAGT |
| | (TGM2) ge | |
| SEQ ID | GI 237858769 NG_012123 | TCCATTTCTACTAAC |
| NO: 661 | Homo sapiens C-C motif chemokine ligand 2 | TGGAGTTGCAGAGGG |
| | (CCL2), RefSeqGene on chromosome 17 | AGAGAAGGGATTCTG |
| | | CTTCTACATTCCTGA |
| SEQ ID | GI 1078569903 NG_051800 | TGTTGCAGATCACAG |
| NO: 662 | Homo sapiens dedicator of cytokinesis 2 | GAAATCATGACCTAG |
| | (DOCK2), RefSeqGene on chromosome 5 | GCCATCAATGTTAGA |
| | | ATTCCAATTGCCTGG |
| SEQ ID | GI 237858739 NG_012110 | ATCGTGTGTTGGGGA |
| NO: 663 | Homo sapiens programmed cell death 1 | TTGTGTGTATATTGC |
| | (PDCD1), RefSeqGene on chromosome 2 | AGATTTTGTATGTGT |
| | | GTTGGGGATTGTGGT |
| SEQ ID | GI 647570744 NG_034141 | CCGGACTCTCCAAAG |
| NO: 664 | Homo sapiens STIP1 homology and | ATTTGGAAAACTTTA |
| | U-box containing protein 1 | CAAAACCAAGTGGAA |
| | (STUB1), RefSeqGene on chromosome 16 | TCAAGCGGATAGGCT |
| SEQ ID | GI 14594701 AY037115 | CTTACAGATCTCTTA |
| NO: 665 | Homo sapiens thymic stromal lymphopoietin | CACTCGTGGTGGGAA |
| | (TSLP) mRNA, complete cds | GAGTTTAGTGTGAAA |
| | | CTGGGGTGGAATTGG |
| SEQ ID | GI 94717638 DQ496106 | ACCAATTGCATTTTC |
| NO: 666 | Homo sapiens aconitase 1, soluble | TGTTTGCTGCTTAAC |
| | (ACO1) gene, complete cds | AGCTTCCATGGGAGA |
| | | AACGATCAACATGTG |
| SEQ ID | GI 325053737 NG_028166 | CAGATCCAGCCTGAT |
| NO: 667 | Homo sapiens aminoacyl tRNA synthetase | CTTCACACTAATGAT |
| | complex interacting multifunctional protein 1 | GAGTGTGTGGCTACA |
| | (AIMP1), RefSeqG | TACAAAGGAGTTCCC |
| SEQ ID | GI 306518675 NG_027688 | CTCAAAACATCAATG |
| NO: 668 | Homo sapiens CD4 molecule | CCTACCAGAGCCTGC |
| | (CD4), RefSeqGene on chromosome 12 | CAGGTAATGTAAATG |
| | | AGAAAAGCAGACTGG |
| SEQ ID | GI 345091009 NG_029843 | TATACTAAAGAGGTC |
| NO: 669 | Homo sapiens nuclear receptor | CTGTTGCCCCAAGCC |
| | subfamily 1 group H member 4 | CAATGAAAGAGTCTT |
| | (NR1H4), RefSeqGene on chromosome 12 | CAAGACGATCACTTG |
| SEQ ID | GI 1024336776 NG_029865 | CAGAACTGCAGATCC |
| NO: 670 | Homo sapiens protein inhibitor of activated STAT 2 | AGACTCCACGCTTGC |
| | (PIAS2), RefSeqGene on chromosome 18 | TTTGTGCTTAATTGT |
| | | ACATCTCATTCACAC |
| SEQ ID | GI 31657141 NM_181501 | GCAGCTTTTGAATGC |
| NO: 671 | Homo sapiens integrin subunit alpha 1 | TAAGGGTTCCAGTAT |
| | (ITGA1), mRNA | GTGACCCAAAGAAAG |
| | | AGTTGTCTCAACTCC |
| SEQ ID | GI 111161293 NM_005746 | TATCTTTACATAGGA |
| NO: 672 | Homo sapiens nicotinamide phosphoribosyltransferase | CGCCAGCAGGGAATT |
| | (NAMPT), mRNA | TTGTTACACTGGAGG |
| | | AAGGAAAAGGAGACC |
| SEQ ID | GI 902763272 NM_002674 | ACATTCAGGTTGGGG |
| NO: 673 | Homo sapiens pro-melanin concentrating hormone | AAAGGCTTTCAGAAG |
| | (PMCH), mRNA | GAAGACACTGCAGAA |
| | | AAATCAGTTATTGCT |
| SEQ ID | GI 41349444 NM_014011 | TACCCATGTTAGCAG |
| NO: 674 | Homo sapiens suppressor of cytokine signaling 5 | ACAGGGAGCTTGGAA |
| | (SOCS5), transcript variant 1, mRNA | AGTCCACACACAGAT |
| | | TGATTACATACACTG |
| SEQ ID | GI 32263626 AY325910 Homo sapiens | TTACTAGCTGGGTGA |
| NO: 675 | hydroxysteroid (17-beta) dehydrogenase 2 | CCTGGGTCAGGTCAC |
| | (HSD17B2) gene, complete cds | CTTACTTGTCATGTC |
| | | TCTATCTTCAAATGA |
| SEQ ID | GI 261599023 NG_013217 Homo sapiens | AGTGTTTGGAGGCTG |
| NO: 676 | apoptosis inducing factor mitochondria | AGGGTACAGAATAGA |
| | associated 1 (AIFM1), RefSeqGene on chromosome [symbol] | AATGTGTGAACTGCT |
| | | TGATTCAGAAGACCA |
| SEQ ID | GI 291045455 NG_016708 Homo sapiens MDM2 | AGGTTATGTAAAAAG |
| NO: 677 | proto-oncogene (MDM2), RefSeqGene on | GCTGGGGATGTGGGA |
| | chromosome 12 | GAGTTTGTTATCCAA |
| | | ATTGCATGGTGGAAA |
| SEQ ID | GI 224809262 NG_011468 Homo sapiens matrix | TGAGGAAACACTTCA |
| NO: 678 | metallopeptidase 9 (MMP9), RefSeqGene on | AAGTGGTAAGACATT |
| | chromosome 20 | TGCCCGAGGTCCTGA |
| | | AGGAAGAGAGTAAAG |
| SEQ ID | GI 1159261282 NG_052987 Homo sapiens zinc | AGTTGGTCTCCTTCC |
| NO: 679 | finger protein 148 (ZNF148), RefSeqGene | TTTCTCTTTCCTGCT |
| | on chromosome 3 | CCGTTGTAGTTTTCA |
| | | TCATTCTCTGCTCTG |
| SEQ ID | GI 539847481 NM_003837 Homo sapiens | CCATCGGAACCATCT |
| NO: 680 | fructose-bisphosphatase 2 (FBP2), mRNA | TTGCCATCTATAGAA |
| | | AGACCTCAGAGGATG |
| | | AGCCTTCTGAAAAGG |
| SEQ ID | GI 219842351 NM_002522 Homo sapiens | GTGAAAAGCAACATG |
| NO: 681 | neuronal pentraxin 1 (NPTX1), mRNA | GACATTTCCTTCTAG |
| | | TCCTTCCAAGGAGGG |
| | | GAGAGAAGTGTATGT |
| SEQ ID | GI 394582046 NM_003877 Homo sapiens | TAAAGTTATGGGCTG |
| NO: 682 | suppressor of cytokine signaling 2 | TACCTGCCCCCTTTG |
| | (SOCS2), transcript variant 1, mRNA | CAATTTGGAAAGCAT |
| | | GGTTTAGAAACTACA |
| SEQ ID | GI 746815979 NM_032525 Homo sapiens | GCTGCAGCTGGAGAG |
| NO: 683 | tubulin beta 6 class V (TUBB6), | AATCAACGTCTACTA |
| | transcript variant 1, mRNA | CAATGAGTCATCGTC |
| | | TCAGAAATATGTGCC |
| SEQ ID | GI 47419892 AY623660 Homo sapiens TNF | TGTAAATTATGCAAC |
| NO: 684 | receptor-associated factor 2 (TRAF2) | TTCAAAGCCTGCCCT |
| | gene, complete cds | GTTTTGCAGTGTATT |
| | | CCATCCTTGAGGAGT |
| SEQ ID | GI 342307072 NG_029607 Homo sapiens | GGTTTTTTGAGGGGG |
| NO: 685 | heat shock transcription factor 2 | AGCTCCCGATTGCTC |
| | (HSF2), RefSeqGene on chromosome 6 | CTGCTTAGAAGGCCC |
| | | TTGAACTAAAAATAG |
| SEQ ID | GI 312261284 NM_016441 Homo sapiens | ATTGCAGAACCAGAT |
| NO: 686 | cysteine rich transmembrane BMP regulator | GCAAGATTCAGTGGC |
| | 1 (CRIM1), mRNA | TTCTACAGCATGCAA |
| | | AAACAGAACCATCTA |
| SEQ ID | GI 332000013 NM_002733 Homo sapiens | TTCATGTCCAAGTCT |
| NO: 687 | protein kinase AMP-activated non- | CTGGAAGAGCTACAG |
| | catalytic subunit gamma l (PRKAG1), | ATTGGCACCTATGCC |
| | transcript variant 1 | AATATTGCTATGGTT |
| SEQ ID | GI 196259787 NM_001098531 Homo sapiens | GTCAGTGAACAGTTC |
| NO: 688 | Rap guanine nucleotide exchange | TCTTCCTTCATTTCT |
| | factor 3 (RAPGEF3), transcript | CCACCTGTAAGCCAG |
| | variant 1, mRNA | GTATGATAAACGCCA |
| SEQ ID | GI 18653445 AF479264 Homo sapiens ligase | GGTATGTAACCAGAC |
| NO: 689 | IV, DNA, ATP-dependent (LIG4) gene, | CATAGCTTTCCCTAG |
| | complete cds | TGTGCTTATCCAGGA |
| | | GTCAACTCTAGGTGT |
| SEQ ID | GI 1024336776 NG_029865 Homo sapiens | GCTGAAGTTGCGTTT |
| NO: 690 | protein inhibitor of activated STAT 2 | AGGAATCTCTCCTCT |
| | (PIAS2), RefSeqGene on chromosome 18 | TCTTATGGCTGATGC |
| | | TACCGTTTAGTCAGG |
| SEQ ID | GI 1000232109 NG_046737 Homo sapiens | TGAGGAAGCTGAGGA |
| NO: 691 | protein phosphatase 1 regulatory subunit | TGATGGTTTTGATAG |
| | 15B (PPP1R15B), RefSeqGene on chromosome 1 | TGATAGCTCACTGTC |
| | | AGACTCAGACCTTGA |
| SEQ ID | GI 384551644 NM_005428 Homo sapiens vav | GCATTTCTTGAAGCC |
| NO: 692 | guanine nucleotide exchange factor 1 | CCTGCAACGGTTCCT |
| | (VAV1), transcript variant 1, mRNA | GAAACCTCAAGACAT |
| | | TGAGATCATCTTTAT |
| SEQ ID | GI 1187633042 KY500729 Homo sapiens | TCCAAGATCTTAAAG |
| NO: 693 | isolate MCF UBD gene, complete cds | CCACGGAGAAGCCTC |
| | | TCATCTTATGGCATT |
| | | GACAAAGAGAAGACC |
| SEQ ID | GI 1078569903 NG_051800 Homo sapiens | TCTTGGTGAGATAGG |
| NO: 694 | dedicator of cytokinesis 2 (DOCK2), | ATGTATCCAAGTGTT |
| | RefSeqGene on chromosome 5 | CAATGGTAAGAGGAG |
| | | AGCCAAGGAGGCTTA |
| SEQ ID | GI 160358379 NG_007100 Homo sapiens | AAATGGGACAAGATG |
| NO: 695 | methylmalonyl-CoA mutase (MUT), | GCCATGACAGAGGAG |
| | RefSeqGene on chromosome 6 | CAAAAGTTATTGCTA |
| | | CAGGATTTGCTGATC |
| SEQ ID | GI 300796044 NG_023367 Homo sapiens | AGACATCTGTTTAAA |
| NO: 696 | platelet derived growth factor receptor | CCCCACAGTGTATGT |
| | beta (PDGFRB), RefSeqGene on | CTGTATGCATGTACC |
| | chromosome 5 | GGTGGGTACACAATT |
| SEQ ID | GI 11545840 NM_022120 Homo sapiens 3- | AGAAATACGAGAAAC |
| NO: 697 | oxoacid CoA-transferase 2 (OXCT2), | GAATTGAGCGCTTAA |
| | mRNA | CGATCCTGAAAGAGG |
| | | AAGATGGAGACGCTG |
| SEQ ID | GI 94557300 NM_006251 Homo sapiens | CTATCGATCTTGCCA |
| NO: 698 | protein kinase AMP-activated catalytic | AAGGAGTGATTCAGA |
| | subunit alpha 1 (PRKAA1), transcript | TGCTGAGGCTCAAGG |
| | variant 1, mRNA | AAAATCCTCAGAAGT |
| SEQ ID | GI 48928023 NM_003225 Homo sapiens | CCTGGTGCTTCTATC |
| NO: 699 | trefoil factor 1 (TFF1), mRNA | CTAATACCATCGACG |
| | | TCCCTCCAGAAGAGG |
| | | AGTGTGAATTTTAGA |
| SEQ ID | GI 237820672 NG_012057 Homo sapiens | AGAGACAAAACTAGA |
| NO: 700 | carboxylesterase 1 (CES1), | GCACAATTCTCCTGA |
| | RefSeqGene on chromosome 16 | TGTTGTCCCACAAAG |
| | | ATATCACCCCTGAGC |
| SEQ ID | GI 223972691 NG_009823 Homo sapiens | TCTTCTCCACGAGTT |
| NO: 701 | crystallin alpha A (CRYAA), | TTAACAAGCATGCGT |
| | RefSeqGene on chromosome 21 | ACTTTTGTAAGTGGT |
| | | GAGTGTAACGGAGGT |
| SEQ ID | GI 193290117 NG_008157 Homo sapiens | TCTCTACTCCATGTA |
| NO: 702 | hydroxysteroid 17-beta dehydrogenase 3 | CTCAGCTTCCAAGGT |
| | (HSD17B3), RefSeqGene on chromosome 9 | GAGTGATGTCATGAC |
| | | TTCCAAGTCTCTTCC |
| SEQ ID | GI 323422857 NM_001565 Homo sapiens | GTTCTGACCCTGCTT |
| NO: 703 | C-X-C motif chemokine ligand 10 | CAAATATTTCCCTCA |
| | (CXCL10), mRNA | CCTTTCCCATCTTCC |
| | | AAGGGTACTAAGGAA |
| SEQ ID | GI 1002635078 NM_006256 Homo sapiens | TACATCTGCCAACCT |
| NO: 704 | protein kinase N2 (PKN2), transcript | AGTTCACCTTGGTTT |
| | variant 1, mRNA | TGTGTCTGCTGTAGA |
| | | AGGGAACCATAACTT |
| SEQ ID | GI 66394595 DQ068066 Homo sapiens | TCTTAGGACTGTCTC |
| NO: 705 | baculoviral lAP repeat-containing 2 | ACATGTTACAGGACA |
| | (BIRC2) gene, complete cds | CCATGCTTGTTTCAC |
| | | ATCCACTAACTGCTG |
| SEQ ID | GI 74418831 DQ185447 Homo sapiens | GCACTTAGGTGGTCT |
| NO: 706 | interferon, alpha 1 (IFNA1) gene, | TTGAAACCTGTCAGG |
| | complete cds | TTTCACATCTCTGCT |
| | | TTGAGTGAAAAGCTC |
| SEQ ID | GI 315013553 NG_027995 Homo sapiens | CCACTGCCACCACTT |
| NO: 707 | cystatin A (CSTA), RefSeqGene on | TCTATGCAGCTACTA |
| | chromosome 3 | CTGTTCCAGAATCAA |
| | | AGAACTTTGCCAAAG |
| SEQ ID | GI 190358530 NG_008050 Homo sapiens | GACAGAGGGACTTGA |
| NO: 708 | endothelin 3 (EDN3), RefSeqGene on | GGCTGGAAGGCAGTT |
| | chromosome 20 | TGATTTGTAGCAAGA |
| | | AAACTTGGTACAAAG |
| SEQ ID | GI 224809340 NG_011507 Homo sapiens | AAGGAATCGATTGCC |
| NO: 709 | glutamate ionotropic receptor NMDAtype | CTAAAACATACCTGT |
| | subunit 1 (GRIN1), RefSeqGene on | TCCACTGTTGGCCAC |
| | chromosome [symbol] | TTTTGCAATAGACAA |
| SEQ ID | GI 211064491 NG_008915 Homo sapiens heat | TTCCTAACTCCATGA |
| NO: 710 | shock protein family D (Hsp60) member 1 | CAGCTCCTCAGTAGA |
| | (HSPD1), RefSeqGene on chromosome 2 | GCTTTCCTCCTCAGA |
| | | AGCAACTAGAACAAT |
| SEQ ID | GI 38327624 NM_004077 Homo sapiens | ATATACCTGTCAGCG |
| NO: 711 | citrate synthase (CS), mRNA | AGAGTTTGCTCTGAA |
| | | ACACCTGCCTAATGA |
| | | CCCCATGTTTAAGTT |
| SEQ ID | GI 195963400 NM_005359 Homo sapiens SMAD | CACCGTAAGACCTCA |
| NO: 712 | family member 4 (SMAD4), mRNA | TTCCATGTTTGTCCA |
| | | GTGCCTTTCAGTGCA |
| | | TTATCAAAGGGAATC |
| SEQ ID | GI 54781368 AY791292 Homo sapiens cyclin | TCTAGATGTCAGCCA |
| NO: 713 | GI (CCNG1) gene, complete cds | AAGGTCTGTGGTTTG |
| | | AGACTAATTGAGTCT |
| | | GCACACGATAATGGC |
| SEQ ID | GI 662840 L39370 Homo sapiens heat shock | CAATTAAAACTGTAA |
| NO: 714 | protein 27 (HSPB1) gene, complete cds | GGTGGGGAAGGAGGA |
| | | GGAAATAAGAGAAGC |
| | | ACCTGAGGCTTGAGT |
| SEQ ID | GI 345478654 NG_029871 Homo sapiens | GACAATCACTACTGG |
| NO: 715 | activating transcription factor 3 (ATF3), | TACTTGGCTAAATAT |
| | RefSeqGene on chromosome 1 | TGCAGCCACCTCTTC |
| | | AGGCTACACATGTCA |
| SEQ ID | GI 347446697 NG_030008 Homo sapiens colony | TCCTTTGGGGAAAGT |
| NO: 716 | stimulating factor 1 (CSF1), RefSeqGene | CTTAAAATTGCCACT |
| | on chromosome 1 | GTACAAATGAGGAAA |
| | | GAGAGGCCCAAAAGG |
| SEQ ID | GI 211064488 NG_008914 Homo sapiens heat | TGATTTCCACTGGAT |
| NO: 717 | shock protein family E (HsplO) member 1 | TAGCACCTTTGCTAA |
| | (HSPE1), RefSeqGene on chromosome 2 | TCTTCTCGAAGCCTT |
| | | CCTTGGCTATAGAGC |
| SEQ ID | GI 393533306 NG_032816 Homo sapiens 5- | TACTGAGAAACTCCA |
| NO: 718 | hydroxytryptamine receptor 1A (HTRIA), | ACCATCAGCCTTCAG |
| | RefSeqGene on chromosome 5 | TAATGATAGGGCTTC |
| | | AAGGTTCACAGCAAA |
| SEQ ID | GI 1041818081 NG_051000 Homo sapiens | GCTAAGTCGCCTTGA |
| NO: 719 | pentraxin 3 (PTX3), RefSeqGene on | GATGGACAATGGTGG |
| | chromosome 3 | AAACTTACTGAGCTT |
| | | TCCACCTCAAATTTG |
| SEQ ID | GI 1024336732 NM_006218 Homo sapiens | ACACTGCACTGTTAA |
| NO: 720 | phosphatidylinositol-4,5-bisphosphate 3- | TAACTCTCAGCAGGC |
| | kinase catalytic subunit alpha (PIK3CA), | AAAGACCGATTGCAT |
| | mRNA | AGGAATTGCACAATC |
| SEQ ID | GI 1073857156 NM_016930 Homo sapiens | CAGGAAGCTGAGATT |
| NO: 721 | syntaxin 18 (STX18), transcript variant | GACAGCATTCACCAG |
| | 1, mRNA | TTAGTTGTGGGGGCA |
| | | ACTGAAAATATCAAG |
| SEQ ID | GI 226532444 NG_011794 Homo sapiens brain | GCCCTTTGTGCATGT |
| NO: 722 | derived neurotrophic factor (BDNF), | TAGTTACAGCATGTA |
| | RefSeqGene on chromosome 11 | CCACATTGCACTGTA |
| | | TTGTTGGTTTTTGGG |
| SEQ ID | GI 260593637 NG_013005 Homo sapiens | AGAAAGGGGTCTTTG |
| NO: 723 | calcitonin receptor (CALCR), RefSeqGene | TGAACTGTACAGGCT |
| | on chromosome 7 | GTCTAGGATATTCAC |
| | | CAGATCACCTCATCT |
| SEQ ID | GI 291575141 NG_016810 Homo sapiens | TATCCTCTACATCCA |
| NO: 724 | nuclear receptor coactivator 3 (NCOA3), | ATATGCATGGGTCAC |
| | RefSeqGene on chromosome 20 | TGTTACAAGAGAAGC |
| | | ACCGGATTTTGCACA |
| SEQ ID | GI 332164677 NG_028910 Homo sapiens | GAAGGAAGGAAGGAG |
| NO: 725 | nuclear receptor subfamily 4 group A | GACACATCAGAGCTT |
| | member 3 (NR4A3), RefSeqGene on | TGGGACCTTACAGAT |
| | chromosome 9 | AATGAAGTTCAACCG |
| SEQ ID | GI 122937306 NM_001080454 Homo sapiens | CTGTGTTTTTGTGCA |
| NO: 726 | acyl-CoA synthetase medium chain family | TCGAATGGCACAGTT |
| | member 4 (ACSM4), mRNA | TGACACTGACACCTT |
| | | CCTAGACACACTTAC |
| SEQ ID | GI 68303552 NM_005165 Homo sapiens | GAGGCGTCATTTTCT |
| NO: 727 | aldolase, fructose-bisphosphate C | TCCATGAGACCCTCT |
| | (ALDOC), mRNA | ACCAGAAAGATGATA |
| | | ATGGTGTTCCCTTCG |
| SEQ ID | GI 538917457 NM_005896 Homo sapiens | CCAAGGATGCTGCAG |
| NO: 728 | isocitrate dehydrogenase (NADP(+)) 1, | AAGCTATAAAGAAGC |
| | cytosolic (IDH1), transcript variant 1, | ATAATGTTGGCGTCA |
| | mRNA | AATGTGCCACTATCA |
| SEQ ID | GI 21927971 AY113189 Homo sapiens OCT-1 | TACACTGGCAACTAT |
| NO: 729 | protein (POU2F1) mRNA, complete cds | TCAAGCTCTTGCTTC |
| | | TGGTGGCTCTCTTCC |
| | | AATAACATCACTTGA |
| SEQ ID | GI 593023777 KJ145927 Homo sapiens lamin | CTCACCTTCACTTCT |
| NO: 730 | A/C (LMNA) gene, complete cds | CAGGGCTTTGGTTTT |
| | | CCCATTCGAAAATGG |
| | | AGGCTGTTCTTAATC |
| SEQ ID | GI 209447054 NG_008716 Homo sapiens | AATTAGAGGGATTAG |
| NO: 731 | aminolevulinate dehydratase (ALAD), | ACCTGGCTTCGACAT |
| | RefSeqGene on chromosome 9 | CTGACTTGACTCCAA |
| | | CCTACCAAAGGATCT |
| SEQ ID | GI 1024336777 NG_046929 Homo sapiens | TTGTCATCTCTGGGG |
| NO: 732 | BTG anti-proliferation factor 2 | CTGTCATTTGCTATC |
| | (BTG2), RefSeqGene on chromosome 1 | CACCATACTTGTCTT |
| | | GTTAGACAAGAGCAG |
| SEQ ID | GI 297515495 NG_021405 Homo sapiens MHC | TTTCCATTGCAGGCG |
| NO: 733 | class 1 polypeptide-related sequence B | TGCCATTTTGTATTT |
| | (MICB), RefSeqGene on chromosome 6 | CTAGAAGCAGTATAC |
| | | AGGGGCTTCAGTTTC |
| SEQ ID | GI 238018099 NG_012213 Homo sapiens | CCTCTTTCTCTGATA |
| NO: 734 | superoxide dismutase 3 (SOD3), | ACACTGTCCTCTTTC |
| | RefSeqGene on chromosome 4 | TCTGATAACACCGTC |
| | | CTCCCTTCCAGATCC |
| SEQ ID | GI 53759124 NM_001295 Homo sapiens C-C | TTGTCAACAAAGTCA |
| NO: 735 | motif chemokine receptor 1 (CCR1), mRNA | CCCACTTCCCACTAT |
| | | TGCTTGCACAAACCA |
| | | ATTAAACCCAGTAGT |
| SEQ ID | GI 798958230 NG_042077 Homo sapiens | CGGTCACAATAGCAG |
| NO: 736 | enoyl-CoA hydratase, short chain 1 | TTTCGCTTTCCATTC |
| | (ECHS1), RefSeqGene on chromosome 10 | CATTTTATCCAGGGT |
| | | GGTTTTATCTCCACC |
| SEQ ID | GI 318064850 NG_028074 Homo sapiens ras | ATCACTGATGAGGAA |
| NO: 737 | related dexamethasone induced 1 | TCTACCAGAGTTAAA |
| | (RASD1), RefSeqGene on chromosome 17 | ATCTCAGCTTGATGA |
| | | GGGGAGCCTGTCAGA |
| SEQ ID | GI 310703611 NG_027845 Homo sapiens | GAGAAAAGTCACACA |
| NO: 738 | clusterin (CLU), RefSeqGene on | AGATCCACCAGGCCT |
| | chromosome 8 | CAGACCTCTGATTCC |
| | | ACAGTCTCATTTTAC |
| SEQ ID | GI 1024336774 NG_046918 Homo sapiens | TTTGTGGACAATTGC |
| NO: 739 | DExD/H-box helicase 58 (DDX58), | AATCCTGAATCCTGC |
| | RefSeqGene on chromosome 9 | ACATCTGCTTCACAG |
| | | TTTTCCCTTTACAGA |
| SEQ ID | GI 226693358 NG_011855 Homo sapiens | TCTTCAGCCTGACTG |
| NO: 740 | heat shock protein family A (Hsp70) | GAATTTACTGCCGGT |
| | member 1 like (HSPAlL), RefSeqGene | GAACCCCTAATAGAG |
| | on chromosome [symbol] | AATATTATCCCAGGA |
| SEQ ID | GI 170932506 NG_007486 Homo sapiens | TTTGGAGGGACACAA |
| NO: 741 | protein kinase AMP-activated non- | TTCAACCCATGACAT |
| | catalytic subunit gamma 2 (PRKAG2), | AGGACTATCAAGGAA |
| | RefSeqGene on chr [symbol] | TGGATATGTCCTGCC |
| SEQ ID | GI 90657251 DQ451402 Homo sapiens heat | TCCTGGGATAATATT |
| NO: 742 | shock 70 kDa protein 1A (HSPA1A) gene, | CTCTATTAGGGGTTC |
| | complete cds | ACCGGCAGTAAATTC |
| | | CAGTCAGGCTGAAGA |
| SEQ ID | GI 325053739 NG_028167 Homo sapiens | GCTCATAGTAGTCTA |
| NO: 743 | growth differentiation factor 3 (GDF3), | TTCCTTCTAGAGCAT |
| | RefSeqGene on chromosome 12 | GCACTCTTGTCTCAT |
| | | CCTCACACGTGCTGT |
| SEQ ID | GI 196259816 NG_008365 Homo sapiens | AGGACATGTAAGTGG |
| NO: 744 | steroid 5 alpha-reductase 2 (SRD5A2), | AGTTTTCCAGCAGGG |
| | RefSeqGene on chromosome 2 | AGAAAACGCAGAGCT |
| | | AAAGCTCATATCTTT |
| SEQ ID | GI 1150561157 NG_052945 Homo sapiens | ATTAATGGGGCTGCA |
| NO: 745 | succinate-CoA ligase GDP-forming beta | GGAGAAGTGAGAAAG |
| | subunit (SUCLG2), RefSeqGene on chromosome 3 | AGATCAGCTGTCATT |
| | | ATGGTCTTCCAAGTG |
| SEQ ID | GI 341865593 NG_029549 Homo sapiens | ACAGGTTTTGAAGCT |
| NO: 746 | TGF-beta activated kinase 1 (MAP3K7) | GAAAAGTCGATGTAG |
| | binding protein 1 (TAB1), RefSeqGene | AGTGGCAACTGACTT |
| | on chromosom | AAGGGACACAGAAGT |
| SEQ ID | GI 193083137 NM_005512 Homo sapiens | TTGGTATAGTGGGAA |
| NO: 747 | leucine rich repeat containing 32 | CATTTGCTTTGGAGA |
| | (LRRC32), transcript variant 1, mRNA | CAGATGAACTGGATT |
| | | CTGATCGTGACCCTG |
| SEQ ID | GI 157909838 NM_006252 Homo sapiens | CCTCCTACAAATGAT |
| NO: 748 | protein kinase AMP-activated catalytic | CATGTTGTTTGCATC |
| | subunit alpha 2 (PRKAA2), mRNA | TGCCTGATTGAGTTC |
| | | CCTTGGTCAAACCTC |
| SEQ ID | GI 88698111 DQ388429 Homo sapiens heat | AGTTTGCTTAAAGAG |
| NO: 749 | shock 70 kDa protein 1B (HSPA1B) gene, | GGCCACCTGCCAAAC |
| | complete cds | AGCTGTAGTATGTGA |
| | | TGTTAAAGAGAGCTA |
| SEQ ID | GI 117606493 EF064721 Homo sapiens | TTCTCCTTCCCTCCT |
| NO: 750 | interleukin 7 (IL7) gene, complete cds | CTTCCTTGTTCACGC |
| | | TATAGCAGAATGTGA |
| | | CATACTCCTTACCAG |
| SEQ ID | GI 34732733 AY388493 Homo sapiens | ACTCACCAGGACCTT |
| NO: 751 | microsomal glutathione S-transferase | CCACTTCCATTTGTT |
| | 3 (MGST3) gene, complete cds | AGATGTGAGGTCCTT |
| | | TTACTCAGCATGTTC |
| SEQ ID | GI 340523104 NG_029469 Homo sapiens | GACTCTACTTTGGCA |
| NO: 752 | heat shock protein family A (Hsp70) | TTGGAGTTAGTGTCA |
| | member 9 (HSPA9), RefSeqGene on | AAGGGAAGGAATCCA |
| | chromosome 5 | GAAACCACCAGTAGG |
| SEQ ID | GI 238776810 NG_012247 Homo sapiens | AAGTTTATTGCCAGG |
| NO: 753 | solute carrier family 25 member 13 | CAACTGAGTAAGGGG |
| | (SLC25A13), RefSeqGene on chromosome | AGAGGAGTCACACTC |
| | 7 | AAGTTTGACTTTCTC |
| SEQ ID | GI 375331875 NM_000895 Homo sapiens | GAACAAGGAAGAATG |
| NO: 754 | leukotriene A4 hydrolase (LTA4H), | AAGTTTACCCGGCCC |
| | transcript variant 1, mRNA | TTATTCAAGGATCTT |
| | | GCTGCCTTTGACAAA |
| SEQ ID | GI 221136810 NM_006931 Homo sapiens | CCTATGCCGAATGCC |
| NO: 755 | solute carrier family 2 member 3 | CTCAGGGGACTTGAA |
| | (SLC2A3), mRNA | TCTTTCCAATAAACC |
| | | AGGTTTAGACAGTAT |
| SEQ ID | GI 751368105 NM_145911 Homo sapiens | CTATATGTGTAGTGT |
| NO: 756 | zinc finger protein 23 (ZNF23), | GTGTGGGAAAGCATT |
| | transcript variant 1, MRNA | CAGGTTTAGCTTCCA |
| | | GCTCAGTCAGCATCA |
| SEQ ID | GI 1049010976 AH002711 Homo sapiens | ACTGTATAAAGAGGC |
| NO: 757 | platelet glycoprotein Illa (ITGB3) | CACGTCTACCTTCAC |
| | gene, complete cds | CAATATCACGTACCG |
| | | GGGCACTTAATGATA |
| SEQ ID | GI 379642970 NG_032137 Homo sapiens | CTCTTTAAAGGCTGA |
| NO: 758 | collagen type IV alpha 2 chain | GTCCTATTCCATTGT |
| | (COL4A2), RefSeqGene on chromosome 13 | GTGGGTGTCTACCCA |
| | | TTGTTGGACACTTGA |
| SEQ ID | GI 1024336768 NG_046906 Homo sapiens | CCACAAAACCAGGGA |
| NO: 759 | TANK binding kinase 1 (TBK1), | CTTTCATCTTAGCCT |
| | RefSeqGene on chromosome 12 | ACCGAGAACACCAAG |
| | | CAGAATTAGACAAGA |
| SEQ ID | GI 307775406 NM_015364 Homo sapiens | TGTTGTTGAAGCTAT |
| NO: 760 | lymphocyte antigen 96 (LY96), | TTCTGGGAGCCCAGA |
| | transcript variant 1, mRNA | AGAAATGCTCTTTTG |
| | | CTTGGAGTTTGTCAT |
| SEQ ID | GI 61744461 NM_003405 Homo sapiens | CGTTAAGCAGTACAT |
| NO: 761 | tyrosine 3-monooxygenase/tryptophan | CTTGTGCATGCAAAA |
| | 5-monooxygenase activation protein | ATGAATTCACCCCTC |
| | eta (YWHAH), [symbol] | CCACCTCTTTCTTCA |
| SEQ ID | GI 187473251 EU600171 Homo sapiens v- | TCTTACTAGGGAAAG |
| NO: 762 | raf murine sarcoma viral oncogene | CCATCAGTACTCTGT |
| | homolog B1 (BRAF) gene, complete cds | GGCTGATCAGCCTTT |
| | | TCTTGCATGAAACAA |
| SEQ ID | GI 237874281 NG_012193 Homo sapiens | AATCAGACCCAATCA |
| NO: 763 | cytochrome c oxidase subunit 6B1 | TGAGAGTATATCTGC |
| | (COX6B1), RefSeqGene on chromosome 19 | TGTGTCCCCTTGAAG |
| | | AGAAGACTCAGACCC |
| SEQ ID | GI 383209671 NG_032573 Homo sapiens | AAGTAACCTCTTACC |
| NO: 764 | DnaJ heat shock protein family | CAAAACTTCCAGGGA |
| | (Hsp40) member B6 (DNAJB6), | TGCTTTACATAATGC |
| | RefSeqGene on chromosome | CAGGCCTCTGAGAAA |
| SEQ ID | GI 983173900 NG_009770 Homo sapiens | AGGGATGGGTTATGA |
| NO: 765 | hexosaminidase subunit beta (HEXB), | AATCAAACTTGTCAG |
| | RefSeqGene on chromosome 5 | TTGGGATCCTTTATA |
| | | TCGGGACCCACACAG |
| SEQ ID | GI 237858685 NG_012086 Homo sapiens | GACTCCATCCTACTT |
| NO: 766 | interleukin 4 receptor (IL4R), | TTCTTCCCATGTATT |
| | RefSeqGene on chromosome 16 | CTTTCCTGCTTGTAC |
| | | CAGTTCACTGGGGTG |
| SEQ ID | GI 1008909437 NG_023257 Homo sapiens | ACATTTCCTGCTATT |
| NO: 767 | lactotransferrin (LTF), RefSeqGene | ACTCTCATGGAAAGG |
| | on chromosome 3 | CCATGATGCTGTCAA |
| | | CAATTGACCACAAGC |
| SEQ ID | GI 970414659 NG_013325 Homo sapiens | GGACATTAACTCTTC |
| NO: 768 | mitogen-activated protein kinase 10 | TAGTACTTCAGAATG |
| | (MAPK10), RefSeqGene on chromosome 4 | GGCTTGTTCAAGGGC |
| | | TGAGCAGGTTTCCTT |
| SEQ ID | GI 212549709 NG_008958 Homo sapiens | TAGAAGTAATTTTAA |
| NO: 769 | minichromosome maintenance complex | GGGCTGAAGCTGTGG |
| | component 6 (MCM6), RefSeqGene on | AATCAGCTCAAGCTG |
| | chromosom [symbol] | GTGACAAGTGTGACT |
| SEQ ID | GI 193211428 NG_008124 Homo sapiens | ATATCTATCTACCCG |
| NO: 770 | msh homeobox 2 (MSX2), RefSeqGene | ACTTCCTGGGCTGTG |
| | on chromosome 5 | TAACTCGGAAAGTGA |
| | | TCTCTCTAGACACCA |
| SEQ ID | GI 300388175 NG_011471 Homo sapiens | AAGTGACAGAAACCC |
| NO: 771 | purinergic receptor P2X 7 (P2RX7), | AACTTGCGTTAACCA |
| | RefSeqGene on chromosome 12 | CAAAGCCTCAAAGGG |
| | | GAATTTATTGGATCA |
| SEQ ID | GI 300244554 NG_023330 Homo sapiens | TAACTCATGCATTTG |
| NO: 772 | SMAD family member 7 (SMAD7), | AGCTCTTTTTTTGCT |
| | RefSeqGene on chromosome 18 | TTTGCTCTTTGCGCA |
| | | TGGGGGATGTAAAGG |
| SEQ ID | GI 78482607 NM_021129 Homo sapiens | TCTAGGCATATTGGC |
| NO: 773 | pyrophosphatase (inorganic) 1 (PPA1), | TATGATTGACGAAGG |
| | mRNA | GGAAACCGACTGGAA |
| | | AGTCATTGCCATTAA |
| SEQ ID | GI 662033938 NG_023295 Homo sapiens | GCCTCTGTCATGTCA |
| NO: 774 | acetyl-CoA carboxylase alpha (ACACA), | TCTGATTGTGCTTGC |
| | RefSeqGene on chromosome 17 | CCCATAGTTAGTGTA |
| | | CTGTGAAAAAGAGGA |
| SEQ ID | GI 226958454 NG_011902 Homo sapiens | TGGCCTGCTATGTGG |
| NO: 775 | CCHC-type zinc finger nucleic acid | AGAACGCTCTTTCCT |
| | binding protein (CNBP), RefSeqGene | TACTGTCTCACTTAA |
| | on chromosome 3 | TAGAACTCCTGTTCT |
| SEQ ID | GI 222144288 NG_009492 Homo sapiens | TTTGCCTCTGTAAGT |
| NO: 776 | insulin like growth factor 1 receptor | ATCTCCATATTCCTC |
| | (IGF1R), RefSeqGene on chromosome 15 | CATCCTTTCAGGTCC |
| | | CATTCAGTCCCTAGG |
| SEQ ID | GI 161086962 NG_007114 Homo sapiens | GGGGTCAGGTGCACT |
| NO: 777 | insulin (INS), RefSeqGene on | TTTTTAAAAAGAAGT |
| | chromosome 11 | TCTCTTGGTCACGTC |
| | | CTAAAAGTGACCAGC |
| SEQ ID | GI 237858728 NG_012105 Homo sapiens | GTGTCACCCCCTTTT |
| NO: 778 | ornithine decarboxylase 1 (ODC1), | ATGCAGTCAAATGTA |
| | RefSeqGene on chromosome 2 | ATGATAGCAAAGCCA |
| | | TCGTGAAGACCCTTG |
| SEQ ID | GI 289577082 NG_016598 Homo sapiens | TGAAAGCTATGGAAT |
| NO: 779 | phosphorylase kinase regulatory | TGCTCTTCAGACGTG |
| | subunit beta (PHKB), RefSeqGene on | TGCACAGGATTTTGG |
| | chromosome 16 | AAACAATTTCTGGGT |
| SEQ ID | GI 45243468 NM_002934 Homo sapiens | CTGTCCTAGTAACAA |
| NO: 780 | ribonuclease A family member 2 | AACTCGCAAAAATTG |
| | (RNASE2), mRNA | TCACCACAGTGGAAG |
| | | CCAGGTGCCTTTAAT |
| SEQ ID | GI 22122007 AY135686 Homo sapiens | TGACTAATTCCTTTA |
| NO: 781 | growth arrest and DNA-damage- | GCAGGGCAGATTAGA |
| | inducible, alpha (GADD45A) gene, | TAAAGCCAAATGAAT |
| | complete cds | TCCTGGCTCACCCCT |
| SEQ ID | GI 4588599 AF111163 Homo sapiens | GTTGAGGACCAGCAT |
| NO: 782 | pyrin (MEFV) gene, complete cds | TTAGACCTCTGAATC |
| | | CAGGGAAGACTTTTC |
| | | TTTGTGTAGCTCAGG |
| SEQ ID | GI 60391308 D50017 Homo sapiens | ATATTTATGTGGACC |
| NO: 783 | PDGFRA gene for alpha-platelet- | CGATGCAGCTGCCTT |
| | derived growth factor receptor, | ATGACTCAAGATGGG |
| | complete cds | AGTTTCCAAGAGATG |
| SEQ ID | GI 922304389 NG_042830 Homo sapiens | TGCTTTACTTCCTGA |
| NO: 784 | acyl-CoA dehydrogenase family member | TGTCAAAATGAGCTG |
| | 11 (ACAD11), RefSeqGene on | CATAGCTTCCCCTCC |
| | chromosome 3 | TTAGAATGGTCAGTC |
| SEQ ID | GI 261598995 NG_013210 Homo sapiens | ACTCCAGACCTACAA |
| NO: 785 | aspartate beta-hydroxylase (ASPH), | AATCAGAAACTCTGG |
| | RefSeqGene on chromosome 8 | GGTTAAGGTCGGCAT |
| | | CATGTCTTAACAAGC |
| SEQ ID | GI 219689119 NG_009261 Homo sapiens | ATATGTCTGCTCACA |
| NO: 786 | elastin (ELN), RefSeqGene on | GGTTCATCCTTAGGC |
| | chromosome 7 | AGGTGTATGCGTATG |
| | | TTTGGAGGAGGTATA |
| SEQ ID | GI 347658934 NG_030028 Homo sapiens | CCTGGGTATGTACAC |
| NO: 787 | mitochondrial antiviral signaling | CACAGAAAGCTATGT |
| | protein (MAVS), RefSeqGene on | CCACCGAGACATTGG |
| | chromosome 20 | CAAGAATGTTTCTAA |
| SEQ ID | GI 296434305 NG_021272 Homo sapiens | ATTGTTAGAAGAGGC |
| NO: 788 | signal transducer and activator of | TCTTCTGTGAGAAAG |
| | transcription 6 (STAT6), RefSeqGene | GAGCAGCAAATGCTA |
| | on chromosome 12 | ACAGCCTGTCTTCTT |
| SEQ ID | GI 225703119 NG_011705 Homo sapiens | CACAATTTGGCTCAT |
| NO: 789 | tyrosinase related protein 1 (TYRP1), | CTATTCCTGAATGGA |
| | RefSeqGene on chromosome 9 | ACAGGGGGACAAACC |
| | | CATTTGTCTCCAAAT |
| SEQ ID | GI 375331875 NM_000895 Homo sapiens | CACCATCCTTCCCTT |
| NO: 790 | leukotriene A4 hydrolase (LTA4H), | ATGGTGGCATGGAGA |
| | transcript variant 1, mRNA | ATCCTTGCCTTACTT |
| | | TTGTAACTCCTACTC |
| SEQ ID | GI 156616272 NM_002664 Homo sapiens | AGTGGAGAGCAACTC |
| NO: 791 | pleckstrin (PLEK), mRNA | AAATGGCAGGAAGAG |
| | | TGAGGAAGAGAACCT |
| | | TTTTGAGATCATCAC |
| SEQ ID | GI 38016923 NM_006253 Homo sapiens protein | GAAGTTTACTTATCT |
| NO: 792 | kinase AMP-activated non-catalytic subunit | GGGTCCTTCAACAAC |
| | beta 1 (PRKAB1), mRNA | TGGAGTAAACTTCCC |
| | | CTCACCAGAAGCCAC |
| SEQ ID | GI 117606677 EF078888 Homo sapiens Kruppel- | CCCAATGACTTTTTC |
| NO: 793 | like factor 2 (lung) (KLF2) gene, complete | ACATTAGCTCACATT |
| | cds | TCACCCCCTGGGTGA |
| | | GATTCAGAATTTCCC |
| SEQ ID | GI 584458490 NG_012645 Homo sapiens FK506 | TAAGCTGCTTAGGCT |
| NO: 794 | binding protein 5 (FKBP5), RefSeqGene on | TGAAACGTGCTGTGT |
| | chromosome 6 | TCTTTTACCAGCCTT |
| | | GATTTTACTCTTGCC |
| SEQ ID | GI 226693358 NG_011855 Homo sapiens heat | GCTTTAAGGATTGTA |
| NO: 795 | shock protein family A (Hsp70) member 1 | GTGGGCGTTTTCCAA |
| | like (HSPAlL), RefSeqGene on chromosome | GGAGGAGGGAATTAC |
| | [symbol] | TTCTAGGATGCTAGC |
| SEQ ID | GI 340523104 NG_029469 Homo sapiens heat | GAACATTGCAACGTT |
| NO: 796 | shock protein family A (Hsp70) member 9 | GGTTAGGGTTGAGGT |
| | (HSPA9), RefSeqGene on chromosome 5 | TGAAATACCTGGCAC |
| | | TGCCAGAAGATAATT |
| SEQ ID | GI 211064488 NG_008914 Homo sapiens heat | CATTGTTCTAGTTGC |
| NO: 797 | shock protein family E (HsplO) member 1 | TTCTGAGGAGGAAAG |
| | (HSPEl), RefSeqGene on chromosome 2 | CTCTACTGAGGAGCT |
| | | GTCATGGAGTTAGGA |
| SEQ ID | GI 224809245 NG_011450 Homo sapiens | CCCTTACAAACATAC |
| NO: 798 | interferon regulatory factor 1 (IRF1), | ACAGCACTCTGCAGG |
| | RefSeqGene on chromosome 5 | GCTCCAATCGAACAA |
| | | ATAGAAGACTGAGAA |
| SEQ ID | GI 345842418 NG_029946 Homo sapiens SMAD | TGCATTTGGACTTCC |
| NO: 799 | family member 2 (SMAD2), RefSeqGene on | AACCTCCACAGGACT |
| | chromosome 18 | CCATCACACATTACT |
| | | GTCACATCAGATTAC |
| SEQ ID | GI 576795860 NM_001549 Homo sapiens | GCAGGGAAGCTTTGC |
| NO: 800 | interferon induced protein with | ATGTTGCTCTAAGGT |
| | tetratricopeptide repeats 3 (IFIT3), | ACATTTTTAAAGAGT |
| | transcript variant 1, mR [symbol] | TGTTTTTTGGCCGGG |
| SEQ ID | GI 117606551 EF064750 Homo sapiens CD80 | GCCATATCCACACTT |
| NO: 801 | molecule (CD80) gene, complete cds | AGTTCTTTGCCAGAC |
| | | TTGTTCTGTGTTTCC |
| | | AGTAGCTAGAGGGTG |
| SEQ ID | GI 26000792 AY186092 Homo sapiens | CCCTCTGCCTGGAAT |
| NO: 802 | interleukin-1 receptor-associated | TTTCTTTTGGGCTTA |
| | kinase 4 (IRAK4) gene, complete cds | TCCTCATTCCCTTTC |
| | | ATTCATCCTTCCAAC |
| SEQ ID | GI 1047225988 NG_051241 Homo sapiens | CCAAAGGGAAAATGA |
| NO: 803 | arrestin domain containing 3 (ARRDC3), | AGGAAGTAAAACAGC |
| | RefSeqGene on chromosome 5 | TTGTGGCTAACTTGC |
| | | GTGGGGAATCCTTAT |
| SEQ ID | GI 209977070 NG_008850 Homo sapiens | ACAGAGAACTGGTCT |
| NO: 804 | interleukin l alpha (ILIA), RefSeqGene | CTCATTTGTCTCATC |
| | on chromosome 2 | CTGTTCTTTCTAGCA |
| | | GCCACGACTTTCCTA |
| SEQ ID | GI 209447066 NG_008725 Homo sapiens | GAGGGTAGAAGGCAA |
| NO: 805 | paraoxonase 2 (PON2), RefSeqGene on | ACCCTAACATTTTTT |
| | chromosome 7 | CCTGCTGTCACCCTC |
| | | CATCTTAGATGACTC |
| SEQ ID | GI 543173138 NM_018202 Homo sapiens | ACTTGTCCTCCTAGC |
| NO: 806 | transmembrane protein 57 (TMEM57), | AGATTTTGTCCTGGA |
| | transcript variant 1, mRNA | GTTCAGATTTGAATA |
| | | CCTGTGGCCATTCTG |
| SEQ ID | GI 270048011 GU143397 Homo sapiens | ATATCAAAAGAAGCA |
| NO: 807 | collagen, type III, alpha 1 (COL3A1) | TGGCCAACAGTGCCA |
| | gene, complete cds | GAAATGGCATCCAGT |
| | | GTCTTGTGTTTATGA |
| SEQ ID | GI 15128210 AF402002 Homo sapiens | GACACTCAATTTGGG |
| NO: 808 | interleukin 20 (IL20) gene, complete | AAGCTGTGTGATCGC |
| | cds | CACAAACCTTCAGGA |
| | | AATACGAAATGGATT |
| SEQ ID | GI 1048072306 NG_051267 Homo sapiens | GAGACCTAATAGAGA |
| NO: 809 | arsA arsenite transporter, ATP-binding, | TGCATGTTTATTGTG |
| | homolog 1 (bacterial) (ASNAl), RefSeqGene | GCAACTTTGGAAGGA |
| | on chr [symbol] | GGGTGTCTTGGGTGA |
| SEQ ID | GI 654825103 NG_029876 Homo sapiens C-C | TACTCTCCATCCCAG |
| NO: 810 | motif chemokine ligand 23 (CCL23), | ACGTGGTCATGGTAC |
| | RefSeqGene on chromosome 17 | TCATTTAAAAGCAGC |
| | | ACCAGAGTATAGACC |
| SEQ ID | GI 190358505 NG_008040 Homo sapiens | CTGGGACTTAGGCTT |
| NO: 811 | colony stimulating factor 2 receptor | CTGTTAATATGGCCC |
| | beta common subunit (CSF2RB), RefSeqGene | TTGGTTTCTTAGCTT |
| | on chrom [symbol] | TTGGGACTACCAAGT |
| SEQ ID | GI 344030205 NG_029797 Homo sapiens | GAGATGGGTGTACAC |
| NO: 812 | glutaredoxin (GLRX), RefSeqGene on | AATTTACAGGTAGAG |
| | chromosome 5 | TGAATGCAAAGGTCC |
| | | TGGGGTAGACGTTTG |
| SEQ ID | GI 1154491908 NG_052978 Homo sapiens | AAGCTTTTGCATTCA |
| NO: 813 | pyruvate kinase, muscle (PKM), | GGGGAATGACTTTGG |
| | | GTTTGGGTGAGGATT |
| | RefSeqGene on chromosome 15 | GTAAAGAGGCAATAT |
| SEQ ID | GI 31343534 NM_178818 Homo sapiens CKLF | GCTTTTTCCAGAATC |
| NO: 814 | like MARVEL transmembrane domain | GATTTTGCAAGCTTC |
| | containing 4 (CMTM4), transcript | AAGATTCTGTTCCCC |
| | variant 1, mRNA | TCTTCGCAGAAGTGA |
| SEQ ID | GI 197304767 NM_014674 Homo sapiens ER | TCTGAAATACTGGGT |
| NO: 815 | degradation enhancing alpha-mannosidase | AGAGAATGGCTGAGG |
| | like protein 1 (EDEM1), mRNA [symbol] | AGGAGATTACCAGAG |
| | | AAGTTGCTTTGCTCA |
| SEQ ID | GI 33867482 AY368173 Homo sapiens | CAGATTCCCTTATGG |
| NO: 816 | microsomal glutathione S-transferase 1 | CATATCATCTCCAGG |
| | (MGST1) gene, complete cds | TTAACTCTGGATCTG |
| | | GGTTCCTGCCTCTAT |
| SEQ ID | GI 292658840 NG_016861 Homo sapiens | CAGGACACCGATGCA |
| NO: 817 | C-X-C motif chemokine ligand 12 (CXCL12), | AACCAAAATAAACTG |
| | RefSeqGene on chromosome 10 | TTGCCTCTGAACACA |
| | | CAAAACAAAACCCTG |
| SEQ ID | GI 1068937310 NG_008847 Homo sapiens | AAACCTAAAGTTGTG |
| NO: 818 | glucokinase (GCK), RefSeqGene on | AATGGCGGAAGCACA |
| | chromosome 7 | AATTTCCCAAGTGGA |
| | | TCATGGAGAGTGATG |
| SEQ ID | GI 257467500 NG_012841 Homo sapiens | TGAAGGCTTGACTGG |
| NO: 819 | interleukin 13 receptor subunit alpha 1 | GGACAGAGCATCCAT |
| | (IL13RA1), RefSeqGene on chromosome X | TTCCAAGTTCACTCA |
| | | TATAGTTGTTGGAAA |
| SEQ ID | GI 1212890194 NG_032955 Homo sapiens | AGGATCAAAAGCCAA |
| NO: 820 | mitogen-activated protein kinase 8 | TCTGGAAAGTTGAGG |
| | interacting protein 2 (MAPK8IP2), | TCAAACTCTCTGTGA |
| | RefSeqGene on chro [symbol] | AATCTGGGAAGGGAT |
| SEQ ID | GI 34732733 AY388493 Homo sapiens | CTCGAACCTCTGTTA |
| NO: 821 | microsomal glutathione S-transferase | AAGCTGAAAGAAGAA |
| | 3 (MGST3) gene, complete cds | GTCAGTCTTCTGCTG |
| | | GGCACACTGTTAGTG |
| SEQ ID | GI 269914110 NG_015981 Homo sapiens | ATGGCAATGCAGCCA |
| NO: 822 | anti-Mullerian hormone receptor | TTGTGTGTCAACAGT |
| | type 2 (AMHR2), RefSeqGene on | TGTAGCAATACCTAT |
| | chromosome 12 | AGCATTTGGGACATT |
| SEQ ID | GI 340805888 NG_029485 Homo sapiens | TCTCCTGAGCTTTAG |
| NO: 823 | ATPase plasma membrane Ca2 | GTTTGAAAGCCCAAA |
| | transporting 1 (ATP2B1), RefSeqGene | ACACACAAAACCCAC |
| | on chromosome 12 | AGTGTTTAACTGGTT |
| SEQ ID | GI 193794846 NG_008174 Homo sapiens | ACCATTGAGGGTTTT |
| NO: 824 | fructose-bisphosphatase 1 (FBP1), | AATGTAGCCGGTCTT |
| | RefSeqGene on chromosome 9 | CTTCCCAGCTTCATA |
| | | ATTGACTCCACTTGT |
| SEQ ID | GI 211064491 NG_008915 Homo sapiens | CGCTCTATAGCCAAG |
| NO: 825 | heat shock protein family D (Hsp60) | GAAGGCTTCGAGAAG |
| | member 1 (HSPD1), RefSeqGene on | ATTAGCAAAGGTGCT |
| | chromosome 2 | AATCCAGTGGAAATC |
| SEQ ID | GI 514388123 NG_029053 Homo sapiens | AAACATCTTCAGTGC |
| NO: 826 | mitogen-activated protein kinase 8 | AATCCATTGTGTGTG |
| | (MAPK8), RefSeqGene on chromosome 10 | GTCTGGGATGACAAG |
| | | GGAAGAGATACTCTG |
| SEQ ID | GI 584458486 NG_012245 Homo sapiens | CGGCAGTGTCTGGAG |
| NO: 827 | N-acetyltransferase 1 (NAT1), | ACATTTTTGGTTGTT |
| | RefSeqGene on chromosome 8 | ACCACTAGGTAGTGC |
| | | TATTGGCATCTAGTG |
| SEQ ID | GI 224809324 NG_011504 Homo sapiens | CGAGTGTTCATAGGA |
| NO: 828 | NAD(P)H quinone dehydrogenase 1 | GAGTTTGCTTACACT |
| | (NQO1), RefSeqGene on chromosome 16 | TACGCTGCCATGTAT |
| | | GACAAAGGACCCTTC |
| SEQ ID | GI 257743484 NG_012879 Homo sapiens | GTCTCTCCTGGCTCT |
| NO: 829 | serpin family A member 3 (SERPINA3), | GAGTTCTATCTTCCA |
| | RefSeqGene on chromosome 14 | TTAAGGTTCTTCCTG |
| | | TTCCTCCCCTCATTC |
| SEQ ID | GI 4826562 Y17151 Homo sapiens Mrna | CCTGTAAAGTGCCTT |
| NO: 830 | for multidrug resistance protein 3 | ACAGGGTAACTGTGC |
| | (ABCC3) | TGAATGCTTTAGATG |
| | | AGGAAATGATCCCCA |
| SEQ ID | GI 211971007 NM_001136538 Homo sapiens | GGAACTTCTATATGG |
| NO: 831 | acyl-CoA dehydrogenase family member | CTTTTTCCTTTTTCC |
| | 10 (ACAD10), transcript variant 1, mRNA | GTGTGGCTGCAATCC |
| | | TACAGGGAGTCTACA |
| SEQ ID | GI 66933013 NM_020139 Homo sapiens | ATACAAGCCAGAGGA |
| NO: 832 | 3-hydroxybutyrate dehydrogenase 2 | AATCCTGAAGAGGCA |
| | (BDH2), mRNA | CGGAATGATTTCCTG |
| | | AAGAGACAAAAGACG |
| SEQ ID | GI 340745281 NG_029473 Homo sapiens | CAACATTGCACAATT |
| NO: 833 | heat shock protein family A (Hsp70) | CAAAATTCTAGGCAC |
| | member 8 (HSPA8), RefSeqGene on | CATTGTTTTGTGCAC |
| | chromosome 11 | CAGCTCAGTCACGTT |
| SEQ ID | GI 196259816 NG_008365 Homo sapiens | TTCTGCAATTTCTCC |
| NO: 834 | steroid 5 alpha-reductase 2 (SRD5A2), | CAATCTCACAGAGCT |
| | RefSeqGene on chromosome 2 | CTGCTATCCTGTAAC |
| | | AATCTGTTTACGCCC |
| SEQ ID | GI 41349436 NM_004329 Homo sapiens | ATTTATGTAACCAGT |
| NO: 835 | bone morphogenetic protein receptor | ATTTGCAACCCACAC |
| | type 1A (BMPR1A), mRNA | TGCCCCCTGTTGTCA |
| | | TAGGTCCGTTTTTTG |
| SEQ ID | GI 52694751 NM_001005340 Homo sapiens | ACTGCCAGATTAACA |
| NO: 836 | glycoprotein nmb (GPNMB), transcript | GATATGGCCACTTTC |
| | variant 1, mRNA | AAGCCACCATCACAA |
| | | TTGTAGAGGGAATCT |
| SEQ ID | GI 56157779 AY835629 Homo sapiens | GTGACTGCTGACAAA |
| NO: 837 | superoxide dismutase 1, soluble | GATGGTGTGGCCGAT |
| | (amyotrophic lateral sclerosis 1 | GTGTCTATTGAAGAT |
| | (adult)) (SOD1) gene, complete [symbol] | TCTGTGATCTCACTC |
| SEQ ID | GI 190194395 NG_008003 Homo sapiens | CAGAATACTGACGTC |
| NO: 838 | acyl-CoA dehydrogenase, short/ | TATAGGAGTGGGACC |
| | branched chain (ACADSB), RefSeqGene | CCTCCCTGGTGTCAC |
| | on chromosome 10 | TGCTGTAAAATTTTA |
| SEQ ID | GI 300193077 NG_023299 Homo sapiens | TCTGGTTTGAGACTG |
| NO: 839 | cAMP responsive element binding | GAACCACCAGGATTT |
| | protein 1 (CREB1), RefSeqGene on | TGATGCTGGTAAGGA |
| | chromosome 2 | TGTCTAAAATGGAGG |
| SEQ ID | GI 257153342 NG_012809 Homo sapiens | TTTTACGACCCTACA |
| NO: 840 | cysteinyl leukotriene receptor 1 | GGGTATCAAGATACT |
| | (CYSLTR1), RefSeqGene on chromosome X | GTGCAGCTCGCCAAC |
| | | AAGGATTAATTGCAA |
| SEQ ID | GI 1172222469 NG_053051 Homo sapiens | TTTTGCCACATTTTT |
| NO: 841 | heat shock protein family H (Hsp110) | TTTCCCCTGGTGAGC |
| | member 1 (HSPH1), RefSeqGene on | TGAGAAACTGATGGA |
| | chromosome 13 | CGAAGTGTTCTGATT |
| SEQ ID | GI 215490061 NG_009062 Homo sapiens | CCCCAGTACACAGAT |
| NO: 842 | nuclear receptor subfamily 3 group | TGTCTTCAGTATCTT |
| | C member 1 (NR3C1), RefSeqGene on chromosome 5 | CCCACTGACCCTCCA |
| | | GTACATATTCTGCAT |
| SEQ ID | GI 255652922 NG_012646 Homo sapiens | TCACTTTGGAGACAC |
| NO: 843 | transforming growth factor beta | CCCCTGTGTCTTCTA |
| | induced (TGFBI), RefSeqGene on | GATGTCAGACTTTCC |
| | chromosome 5 | AAATCTGTCTGCTAT |
| SEQ ID | GI 313569850 NM_144601 Homo sapiens | TCTGGGGGTGAGATG |
| NO: 844 | CKLF like MARVEL transmembrane domain | ACCATTCTGGGTCTA |
| | containing 3 (CMTM3), transcript | AGACTGTTTCAAAGA |
| | variant 1, mRN [symbol] | AGAGCTCATAGACTG |
| SEQ ID | GI 312261284 NM_016441 Homo sapiens | TTCCAAGCCAATCAA |
| NO: 845 | cysteine rich transmembrane BMP | TCAGCCAGTTCCTAG |
| | regulator 1 (CRIM1), mRNA | CAGAGTCAGCACATG |
| | | AACAAGATCTAAGTC |
| SEQ ID | GI 373432598 NM_001511 Homo sapiens | GGCCAATGAGATCAT |
| NO: 846 | C-X-C motif chemokine ligand 1 | TGTGAAGGCAGGGGA |
| | (CXCL1), transcript variant 1, | ATGTATGTGCACATC |
| | mRNA | TGTTTTGTAACTGTT |
| SEQ ID | GI 1005261235 NM_000399 Homo sapiens | ACTGAGCGAGGAGCA |
| NO: 847 | early growth response 2 (EGR2), | ATTGATTAATAGCTC |
| | transcript variant 1, mRNA | GGCGAGGGGACTCAC |
| | | TGACTGTTATAATAA |
| SEQ ID | GI 324072795 NM_005402 Homo sapiens | ATCCTTTGGTGAAAA |
| NO: 848 | RAS like proto-oncogene A (RALA), | CTGAGACACAAAATG |
| | mRNA | GCTGCAAATAAGCCC |
| SEQ ID | GI 570359552 NM_001288718 Homo sapiens | AAGGATGAGGTCTTC |
| NO: 849 | signal transducer and activator of | TCCAAGTACTACACT |
| | transcription 5A (STAT5A), transcript | CCTGTGCTGGCTAAA |
| | variant 1, mRNA | GCTGTTGATGGATAT |
| SEQ ID | GI 1024846757 NG_047018 Homo sapiens | TCTCTGAATTGCAGG |
| NO: 850 | histone deacetylase 1 (HDAC1), | GTCTTATTTCCCTCC |
| | RefSeqGene on chromosome 1 | AAGATGAGGCAAATT |
| | | CATGCCTTTCCTGTA |
| SEQ ID | GI 211904121 NG_008930 Homo sapiens | ACTGTTGAGTTCAGG |
| NO: 851 | cytochrome p450 oxidoreductase (POR), | ACACACCACGTGTAG |
| | RefSeqGene on chromosome 7 | CTGTGATCCAGGATA |
| | | AGAAGCTACTTCTAC |
| SEQ ID | GI 340805876 NG_029513 Homo sapiens | GCCAGCCCTACAAAA |
| NO: 852 | ribosomal protein 56 kinase B1 | ATAGGAGGTATAAGA |
| | (RPS6KB1), | ATGTTGCAGGCAGAA |
| | RefSeqGene on chromosome 17 | GAACAGCAAATGCAA |
| SEQ ID | GI 32815079 AY338491 Homo sapiens | TAACTATGTTGGACT |
| NO: 853 | cyclin B1 (CCNB1) gene, complete cds | ATGACATGGTGCACT |
| | | TTCCTCCTTCTCAAA |
| | | TTGCAGCAGGAGCTT |
| SEQ ID | GI 300193077 NG_023299 Homo sapiens | TTCCTGGAGGTTCTA |
| NO: 854 | cAMP responsive element binding | GGTGAAAATGTGTTT |
| | protein 1 (CREB1), RefSeqGene on | CTTTGCCATTTCTAG |
| | chromosome 2 | CTTCTAGAGGCCACC |
| SEQ ID | GI 262331544 NG_013350 Homo sapiens | CCTTGACAAGATCAA |
| NO: 855 | nuclear receptor subfamily 3 group C | GGCAACCTCAGAATA |
| | member 2 (NR3C2), RefSeqGene on | GAGGTTGCTGATGAG |
| | chromosome 4 | AACCTGGAATGAGTG |
| SEQ ID | GI 226693341 NG_011851 Homo sapiens | CTAGAGCGAAAAGCC |
| NO: 856 | synuclein alpha (SNCA), RefSeqGene on | TTAGGACCGCTTGTT |
| | chromosome 4 | TTAGACGGCTGGGGA |
| | | ATATTTATTCCTTGT |
| SEQ ID | GI 225703119 NG_011705 Homo sapiens | AGAATGAGTGCTCCT |
| NO: 857 | tyrosinase related protein 1 (TYRP1), | AAACTCCTCTCTCTG |
| | RefSeqGene on chromosome 9 | GGCTGTATCTTCTTC |
| | | CCCTTGCTACTTTTT |
| SEQ ID | GI 59853224 NM_001206 Homo sapiens | TCATGGAATGGTTCT |
| NO: 858 | Kruppel like factor 9 (KLF9), mRNA | GCTTATGATACTCTG |
| | | CACGCTGCCTTTTAG |
| | | TGAGTGAGGAGTTTG |
| SEQ ID | GI 669033292 NM_006798 Homo sapiens | TCTTATTGCCTCAGC |
| NO: 859 | UDP glucuronosyltransferase family 2 | CCTTGCCCAGATTCC |
| | member A1 complex locus (UGT2A1), | ACAGAAGGTTTTATG |
| | transcript variai [symbol] | GAGATACAAAGGAAA |
| SEQ ID | GI 66394595 DQ068066 Homo sapiens | AGCGTCAACTTCAAA |
| NO: 860 | baculoviral lAP repeat-containing 2 | AGTCGTTCGTTGGTT |
| | (BIRC2) gene, complete cds | GTCATACCACAAACA |
| | | TTTACTGCACGACAC |
| SEQ ID | GI 167887711 EF445033 Homo sapiens | AGTTCGTGATTCCCT |
| NO: 861 | signal transducing adapter molecule 1 | CCTCTTTTCTGAAAT |
| | (STAM) gene, complete cds, | GCTTTCTTCACTTGC |
| | alternatively spliced | TGGTGACCATTCTCT |
| SEQ ID | GI 190194387 NG_008002 Homo sapiens | TTGGGAAAGGGCCTT |
| NO: 862 | acyl-CoA dehydrogenase, long chain | TCCCAAGTAGCAGAA |
| | (ACADL), RefSeqGene on chromosome 2 | ACAAGATTTTCAAAG |
| | | ACTCATAGGTCAGGA |
| SEQ ID | GI 537544658 NG_033791 Homo sapiens | TGCTTTGAGAGTATG |
| NO: 863 | gremlin 1, DAN family BMP antagonist | TGTCCTCTGGGACAA |
| | (GREM1), RefSeqGene on chromosome 15 | GTGGAATGAAAGAGA |
| | | GGATAGAGGCAAAGA |
| SEQ ID | GI 334191656 NG_029012 Homo sapiens | TTCATGCTTCATTAA |
| NO: 864 | integrin subunit beta 1 (ITGB1), | GGCAGGCATTGCAAA |
| | RefSeqGene on chromosome 10 | CTAGTTCAGAGGAGA |
| | | GAATCCACGATGACA |
| SEQ ID | GI 188219645 NG_007730 Homo sapiens | AATTGGTAGGTTCGA |
| NO: 865 | protein tyrosine phosphatase, receptor | GGCACAGAAAGGTCA |
| | type C (PTPRC), RefSeqGene on | GGCATCTGTAGTATG |
| | chromosome 1 | GTGAGTAAGAACTGA |
| SEQ ID | GI 118722343 NM_030949 Homo sapiens | TAAGTGTCAAGGTGA |
| NO: 866 | protein phosphatase 1 regulatory | GAAAGCCTCACATTC |
| | inhibitor subunit 14C (PPP1R14C), mRNA | TCTCAAGACAGTTGC |
| | | TCTAGGAGCTGAGTT |
| SEQ ID | GI 423091980 JX512648 Homo sapiens | AAACAGGTTCTTGGA |
| NO: 867 | SH2 domain containing 1A (SH2D1A) | GTGCTGAGACAGCAC |
| | mRNA, complete cds | CTGGGGTACATAAAA |
| | | GATAATTCCGGAAAA |
| SEQ ID | GI 1028916196 KU928257 Homo sapiens | TTGTCCAGCACCACC |
| NO: 868 | complement decay-accelerating factor | ACAAATTGACAATGG |
| | (CD55) gene, CD55-203A allele, | AATAATTCAAGGGGA |
| | complete cds | ACGTGACCATTATGG |
| SEQ ID | GI 209977025 NG_008836 Homo sapiens | GCTTTTTCTACACTT |
| NO: 869 | angiotensinogen (AGT), RefSeqGene | ACACTTGCCTGGTAG |
| | on chromosome 1 | TTTTGGAGGGGGAGA |
| | | AAACATTGCAATCCG |
| SEQ ID | GI 340805888 NG_029485 Homo sapiens | GTTCCTAGTCACTCC |
| NO: 870 | ATPase plasma membrane Ca2 | ATGAGCAAGTCACTT |
| | transporting 1 (ATP2B1), RefSeqGene on | TATGTGCCTTGAAGC |
| | chromosome 12 | CTATTTCACCTTGGT |
| SEQ ID | GI 291575141 NG_016810 Homo sapiens | AGGCATGAAAACAGG |
| NO: 871 | nuclear receptor coactivator 3 (NCOA3), | AATGTTTGTTCTCAT |
| | RefSeqGene on chromosome 20 | TTAGGGTCATGGGTT |
| | | TTCAGGCTTGAGTGG |
| SEQ ID | GI 520260356 NM_021913 Homo sapiens | CCCTATACTGTAGTA |
| NO: 872 | AXL receptor tyrosine kinase (AXL), | TTCTTTGGGGTGCCC |
| | transcript variant 1, mRNA | CTCTCCTTCTTAGCT |
| | | ATCATTGCTTCCTCC |
| SEQ ID | GI 666335577 NM_006494 Homo sapiens | CCACAAGGTCACAGC |
| NO: 873 | ETS2 repressor factor (ERF), | AGGGGAGGGAGGGAC |
| | transcript variant 1, mRNA | AATTTTATAATGAAC |
| | | CAAAAATTCCATGTG |
| SEQ ID | GI 1020158924 NM_002895 Homo sapiens | GGACGGAGATATTTA |
| NO: 874 | RB transcriptional corepressor like 1 | CGAGAAAAAGAAGCA |
| | (RBL1), transcript variant 1, mRNA | GTCATTACTCCTGTT |
| | | GCATCAGCCACCCAA |
| SEQ ID | GI 2246432 U45984 Homo sapiens | GTAACCTGACACTCT |
| NO: 875 | CCR6 chemokine receptor (CMKBR6) gene, | CAGGAGACATTAAGA |
| | complete cds | TAGAAGGGGCTGTTC |
| | | TTCAGTGGTTCCCAT |
| SEQ ID | GI 224809428 NG_011537 Homo sapiens | GAGTGCAGAGACTGA |
| NO: 876 | myosin heavy chain 3 (MYH3), | GAAAGAGATGGCCAC |
| | RefSeqGene on chromosome 17 | CATGAAGGAAGAATT |
| | | CCAGAAAACCAAAGA |
| SEQ ID | GI 325652058 NM_005524 Homo sapiens | ACCTCTCTCCTTGGT |
| NO: 877 | hes family bHLH transcription factor 1 | CCTGGAACAGCGCTA |
| | (HES1), mRNA | CTGATCACCAAGTAG |
| | | CCACAAAATATAATA |
| SEQ ID | GI 599044742 NM_012234 Homo sapiens | GAGTTATCTAAGCAA |
| NO: 878 | RING1 and YYl binding protein (RYBP), | TCAGATGTTACAGGG |
| | mRNA | CCAGCCCTTTAGCTG |
| | | CTGTGGTGTATTCTG |
| SEQ ID | GI 221139857 NG_009364 Homo sapiens | CGGTGATGGATAAAA |
| NO: 879 | cyclin dependent kinase inhibitor 1A | TCACATCTGTGAAGC |
| | (CDKN1A), RefSeqGene on chromosome 6 | ATGGTGGGACACTCC |
| | | ATAATACCCCTCAAG |
| SEQ ID | GI 267844874 NG_015840 Homo sapiens | TGGCATGTCAGACAG |
| NO: 880 | interferon gamma (IFNG), RefSeqGene | AACTTGAATGTGTCA |
| | on chromosome 12 | GGTGACCCTGATGAA |
| | | AACATAGCATCTCAG |
| SEQ ID | GI 325651825 NG_028190 Homo sapiens | AGTCCTGACCTTTGT |
| NO: 881 | notch 4 (NOTCH4), RefSeqGene on | TGCGTTCCAGATAGA |
| | chromosome 6 | TACTTGCATCAGCCT |
| | | CCTAACTACAGTCTC |
| SEQ ID | GI 654825055 NG_028206 Homo sapiens | ATGAGTGTGGGATTT |
| NO: 882 | prostaglandin-endoperoxide synthase 2 | GACCAGTATAAGTGC |
| | (PTGS2), RefSeqGene on chromosome 1 | GATTGTACCCGGACA |
| | | GGATTCTATGGAGAA |
| SEQ ID | GI 1050193335 NG_027721 Homo sapiens | CTGCAGGAAAAGTGC |
| NO: 883 | transforming growth factor beta 2 | AGTCATTTCTGGAAA |
| | (TGFB2), RefSeqGene on chromosome 1 | GGGAAATGAGGGGGT |
| | | TTGTTCTCTTCATTC |
| SEQ ID | GI 493799665 NM_002994 Homo sapiens | CTGCGTTGCGTTTGT |
| NO: 884 | C-X-C motif chemokine ligand 5 | TTACAGACCACGCAA |
| | (CXCL5), mRNA | GGAGTTCATCCCAAA |
| | | ATGATCAGTAATCTG |
| SEQ ID | GI 119703747 NM_001432 Homo sapiens | CTCCTTCATCGAATG |
| NO: 885 | epiregulin (EREG), mRNA | CTAAACCTTTGAGTA |
| | | GAGTCTCCCTGGATC |
| | | ACATACCAGGTCAGG |
| SEQ ID | GI 1002341790 NM_000043 Homo sapiens | AAGTGTTAATGCCCA |
| NO: 886 | Fas cell surface death receptor (FAS), | AGTGACTGACATCAA |
| | transcript variant 1, mRNA | CTCCAAGGGATTGGA |
| | | ATTGAGGAAGACTGT |
| SEQ ID | GI 4455060 AF118265 Homo sapiens | AGTTAAAGCAGTGCT |
| NO: 887 | orphan G protein-coupled receptor | TCTCAAACCTTGATG |
| | GPR44 (GPR44) gene, complete cds | TGCCTGTGAATCACC |
| | | TAGGGGTCTTGTTAA |
| SEQ ID | GI 457232 L26524 Homo sapiens | ATTACCCTCCTCTTA |
| NO: 888 | PRKDC gene, complete sequence | CTTGGTGCTGTCTTA |
| | | CCTCATCAGTGAATG |
| | | ATGTCACCGTTCAGT |
| SEQ ID | GI 292658840 NG_016861 Homo sapiens | CCAGACACACATTAC |
| NO: 889 | C-X-C motif chemokine ligand 12 | CAAAATCTGGCAGGG |
| | (CXCL12), RefSeqGene on | TAGTAAAGTGCCTTG |
| | chromosome 10 | TTGTCCTTACCTCTT |
| SEQ ID | GI 189217843 NG_007930 Homo sapiens | TTTCTGGCCCAATTT |
| NO: 890 | cytochrome P450 family 2 subfamily | CTACCTACATTCCTC |
| | F member 1 (CYP2F1), RefSeqGene on | ACCCTAATTCCACTT |
| | chromosome 19 | GCCAAATCCTCTCAC |
| SEQ ID | GI 209977070 NG_008850 Homo sapiens | TGTTGAATACAGCAC |
| NO: 891 | interleukin l alpha (ILIA), RefSeqGene | CTACTGAAAGAACTT |
| | on chromosome 2 | TCATTCCCTGACCAT |
| | | GAACAGCCTCTCAGC |
| SEQ ID | GI 269954730 NG_016009 Homo sapiens | GTGCAACAGTGAGTG |
| NO: 892 | kininogen 1 (KNG1), RefSeqGene | AATGCAACCAATGTG |
| | on chromosome 3 | ACTGGAAGAAGTTGA |
| | | CTAGGTAGAGGGATC |
| SEQ ID | GI 291219867 NG_016781 Homo sapiens | TTCTAATGGTTGAGC |
| NO: 893 | pyruvate dehydrogenase alpha 1 | CTCAGAGTACATATT |
| | (PDHA1), RefSeqGene on chromosome X | TGGGGTGCGGTTTGG |
| | | TTTGCTTTGTAGAGT |
| SEQ ID | GI 401709987 NG_032900 Homo sapiens | AGTCCTTGGGGTTAA |
| NO: 894 | prostaglandin-endoperoxide synthase 1 | GTCTCCTGTCTTATG |
| | (PTGS1), RefSeqGene on chromosome 9 | GTCCAGAAACTCCTG |
| | | TTTCTCCTTAGTTGG |
| SEQ ID | GI 323276689 NG_028137 Homo sapiens | GAAGCTGTGAGGGAA |
| NO: 895 | secretory leukocyte peptidase | GATCTAGATATGAGG |
| | inhibitor (SLPI), RefSeqGene on | CCTCCTTCCTATGAA |
| | chromosome 20 | TACGTAGTGGGAGGA |
| SEQ ID | GI 1024846748 NG_046980 Homo sapiens | TTGGGGAAAACTTAG |
| NO: 896 | synaptonemal complex protein 2 (SYCP2), | AATACTGTCCCTTTC |
| | RefSeqGene on chromosome 20 | CTCCTGATCCTGAGG |
| | | TTTTGAGGTAAGGGA |
| SEQ ID | GI 695917236 NM_021010 Homo sapiens | GTCGCTGAGCTTCCT |
| NO: 897 | G | AGATAGAAACCAAAG |
| | | CAGTGCAAGATTCAG |
| | | TTCAAGGTCCTGAAA |
| SEQ ID | GI 14488405 AF386077 Homo sapiens | CTTCCATGATCTTCA |
| NO: 898 | interleukin 17B (IL17B) gene, | GTTTCCTCACGTGGA |
| | complete cds | ACATGGAGTTGATTA |
| | | CTGCCTTTCCTCCAG |
| SEQ ID | GI 368711279 NG_031983 Homo sapiens | CCAGAGTTCTTAACA |
| NO: 899 | heat shock protein family B (small) | CACATAAACTGCCTG |
| | member 6 (HSPB6), RefSeqGene on | GTCCTAAAAGAGTGC |
| | chromosome 19 | TGCAGAAACAGCTCT |
| SEQ ID | GI 237858686 NG_012087 Homo sapiens | GGGTCAATTCTCAAA |
| NO: 900 | interleukin 6 receptor (IL6R), | GGAAATGACATCACC |
| | RefSeqGene on chromosome 1 | TCATCTGAGATCCAA |
| | | AGGCCAAGTAGGGAC |
| SEQ ID | GI 1024846744 NG_047021 Homo sapiens | GATAAAACCATACGG |
| NO: 901 | nudix hydrolase 15 (NUDT15), | ATGTCAAAACTGTCT |
| | RefSeqGene on chromosome 13 | TCTTGTGCTGAGTCA |
| | | GTTCCTCGATGGGGG |
| SEQ ID | GI 300388175 NG_011471 Homo sapiens | TCGATCTGACCAGTT |
| NO: 902 | purinergic receptor P2X 7 (P2RX7), | TAGCAACCTCAGTGA |
| | RefSeqGene on chromosome 12 | AAAGAAAACACCTCT |
| | | TTGCCAGAAGGTTCA |
| SEQ ID | GI 238637280 NG_012233 Homo sapiens | CTGCATGTTACTGCC |
| NO: 903 | pyruvate dehyrogenase phosphatase | ACCACAAACATCTCT |
| | catalytic subunit 1 (PDP1), | GTTGTTCCTCATCGT |
| | RefSeqGene on chromosom [symbol] | ACATTCCTCAGAGTC |
| SEQ ID | GI 238018083 NG_012204 Homo sapiens | GTCTCAGGAAGTGGT |
| NO: 904 | peroxisome proliferator activated | TTAGGATGTTTCAGC |
| | receptor alpha (PPARA), | GAGAGCATGATACAG |
| | RefSeqGene on chromosome 22 | ACTAACCCAGGAAGA |
| SEQ ID | GI 341572562 NG_029524 Homo sapiens | CAACCTTTAGGATGG |
| NO: 905 | TNF superfamily member 13b (TNFSF13B), | ACAGGTTGCCCTTGT |
| | RefSeqGene on chromosome 13 | GATGTCAGCAAACCC |
| | | TTGACCAGTATATAA |
| SEQ ID | GI 126116577 NM_176823 Homo sapiens | GGTCGTCAAGAGAAC |
| NO: 906 | S100 calcium binding protein A7A | TGTGTCATTCCAAAC |
| | (S100A7A), mRNA | TCACCAAGGTGGCTT |
| | | ATAGAACAGAAGCAG |
| SEQ ID | GI 225579056 NM_003049 Homo sapiens | GTAAACTAGAGAGAG |
| NO: 907 | solute carrier family 10 member 1 | CAGCAAAAACACCAG |
| | (SLC10A1), mRNA | TCTTGCCTGAGTCTT |
| | | TCTCCAGCATTTCCA |
| SEQ ID | GI 269954683 NG_015990 Homo sapiens | AAAATGAGCTAGAAC |
| NO: 908 | C-C motif chemokine ligand 5 (CCL5), | AGGGAAAGCTGAGAA |
| | RefSeqGene on chromosome 17 | AACAGGAGTCCAGTT |
| | | TAGCGGCTACTGTTG |
| SEQ ID | GI 973353146 NG_016274 Homo sapiens | ATTCTTTCCCAAAGG |
| NO: 909 | hepatocyte growth factor (HGF), | TCCCTTCTTGAGATA |
| | RefSeqGene on chromosome 7 | CATGTGTTTCTCAGA |
| | | AGCCAGGCATGTCAA |
| SEQ ID | GI 193211405 NG_008118 Homo sapiens | GAGTGGGAAGACCTG |
| NO: 910 | left-right determination factor 2 | ACTTTATGGGGGTAT |
| | (LEFTY2), RefSeqGene on chromosome 1 | TGATTGTGGATCATC |
| | | GACTGTGTGTGTTTG |
| SEQ ID | GI 236459493 NG_012010 Homo sapiens | ATAGCTCATACACAC |
| NO: 911 | lymphotoxin alpha (LTA), RefSeqGene | CCAGAATGTTACTTA |
| | on chromosome 6 | CATGTCCCTCCATGT |
| | | TACACCAAGACCCCT |
| SEQ ID | GI 340007392 NG_029438 Homo sapiens | CAGGGAGGTGACGGG |
| NO: 912 | mitogen-activated protein kinase | TCTGTCATGCTTCTA |
| | kinase 7 (MAP2K7), RefSeqGene on | TCCCTGTTTCACCCT |
| | chromosome 19 | CTTTATTTTTTTTGA |
| SEQ ID | GI 291045457 NG_016717 Homo sapiens | GGCGTTAACAAGCAA |
| NO: 913 | phosphoribosyl pyrophosphate | TCAGGGTACAGGGTG |
| | synthetase 2 (PRPS2), RefSeqGene | TTCAGAATCAAGGAT |
| | on chromosome X | GAGCACAATAAGAGA |
| SEQ ID | GI 341823644 NG_029509 Homo sapiens | TCCAAGACCCAGGAG |
| NO: 914 | prostaglandin E receptor 3 (PTGER3), | CAGACTATAATTGAA |
| | RefSeqGene on chromosome 1 | GCCAGTTGTCTAATC |
| | | CCACTGAGAATCACA |
| SEQ ID | GI 209447083 NG_008732 Homo sapiens | CATTTGTTTGTACAA |
| NO: 915 | vascular endothelial growth factor A | GATCCGCAGACGTGT |
| | (VEGFA), RefSeqGene on chromosome 6 | AAATGTTCCTGCAAA |
| | | AACACAGACTCGCGT |
| SEQ ID | GI 406737 X75342 H. sapiens SHB mRNA | GAGGAGCAACCAGGG |
| NO: 916 | | TTTTATGCACATGAA |
| | | ACTGGCCAAAACCAA |
| | | AGAGAAATACGTTCT |
| SEQ ID | GI 374349244 NG_032042 Homo sapiens | CCCTCTTGAATGAGT |
| NO: 917 | annexin A5 (ANXA5), RefSeqGene on | CATTTAAAGTCACAT |
| | chromosome 4 | TTGCAGACAGTTTTG |
| | | GGTGGGCAGTGATGG |
| SEQ ID | GI 1047225988 NG_051241 Homo sapiens | TTGAATCAAGTTGAT |
| NO: 918 | arrestin domain containing 3 (ARRDC3), | GTGGGTTCCGAACTG |
| | RefSeqGene on chromosome 5 | TATCTCTTCCGGCTG |
| | | AGGACAGAGAAGTAT |
| SEQ ID | GI 927669118 NM_001166693 Homo sapiens | CCAAACTGAAGATGC |
| NO: 919 | AF4/FMR2 family member 1 (AFF1), | CTTCTCAGTCAGTTG |
| | transcript variant 1, mRNA | AGCAGACCTACTCCA |
| | | ATGAAGTCCATTGTG |
| SEQ ID | GI 14278713 AF377330 Homo sapiens | CAGCACTGTCTCAGT |
| NO: 920 | urokinase-type plasminogen activator | TTCACTTTCACATAG |
| | (PLAU) gene, complete cds | ATGTCCCTTTCTTGG |
| | | CCAGTTATCCCTTCC |
| SEQ ID | GI 306518675 NG_027688 Homo sapiens | TCTCAGAGCATCCAG |
| NO: 921 | CD4 molecule (CD4), RefSeqGene on | TTAGGGGTGTGCAAG |
| | chromosome 12 | TTTACTTTGTTACTG |
| | | GCTGATGTTGTGAAG |
| SEQ ID | GI 1013071127 NG_021208 Homo sapiens | TTCTTTCCATTCTGC |
| NO: 922 | opioid receptor mu1 (OPRM1), | ATCACAGCACAGAGC |
| | RefSeqGene on chromosome 6 | CATCCCATCTGCTCA |
| | | CATGATTAGAATCAT |
| SEQ ID | GI 908212430 NM_000412 Homo sapiens | GGTCCTCATAGATTT |
| NO: 923 | histidine rich glycoprotein (HRG), | CTTTGAGGATACTGA |
| | mRNA | GCGCTACAGAAAACA |
| | | AGCCAACAAAGCCCT |
| SEQ ID | GI 1060856491 NM_005526 Homo sapiens | TCCTTGAGAACATCA |
| NO: 924 | heat shock transcription factor 1 | AGAGGAAAGTGACCA |
| | (HSF1), mRNA | GTGTGTCCACCCTGA |
| | | AGAGTGAAGACATAA |
| SEQ ID | GI 1159261125 NM_001349413 Homo sapiens | AGAGTTTGACCTCAT |
| NO: 925 | kelch like family member 24 (KLHL24), | TAGTATGGTGCTTTG |
| | transcript variant 1, mRNA | GGTGAGGACCTCTTC |
| | | CTTGATTATCCCACT |
| SEQ ID | GI 543583730 NM_006601 Homo sapiens | GCATGAACATTTCCC |
| NO: 926 | prostaglandin E synthase 3 (PTGES3), | AGACTTTCATGAAGC |
| | transcript variant 1, mRNA | TGTTGAGGTCCTAGG |
| | | CAATTAATGCAGCAG |
| SEQ ID | GI 41324131 AY527817 Homo sapiens | AGAAAAATATTTCTC |
| NO: 927 | arachidonate 12-lipoxygenase (ALOX12) | AGGCCCCAAGCCCAA |
| | gene, complete cds | AGCTGTGCTAAACCA |
| | | ATTCCGAACAGATTT |
| SEQ ID | GI 67515420 DQ088846 Homo sapiens | GGCAAAGCTGAAATT |
| NO: 928 | myeloperoxidase (MPO) gene, complete | TGAAGCCAGATTAGC |
| | cds | CTAACCTCAAAGCCT |
| | | GTGCCTATGTTATGG |
| SEQ ID | GI 1036032775 AH003000 Homo sapiens | GCCACTGTTGGCATG |
| NO: 929 | steroid 5-alpha-reductase (SRD5A1) | TACAATGGCGATTAT |
| | gene, complete cds | GTTCTGTACCTGTAA |
| | | CGGCTATTTGCAAAG |
| SEQ ID | GI 570359607 NG_033871 Homo sapiens | TTGTACTACTTCCAC |
| NO: 930 | F-box protein 38 (FBX038), | CACTACATCATTCTT |
| | RefSeqGene on chromosome 5 | GAACATGACAGCTGG |
| | | TGCCTAGCATTGCAC |
| SEQ ID | GI 307133762 NG_027719 Homo sapiens | AGGGCTTTTAGGGAG |
| NO: 931 | glutathione-disulfide reductase | AGTGACTCATAGTCC |
| | (GSR), RefSeqGene on chromosome 8 | ATGAGCCTATCTTCA |
| | | CTTTGATTCACCCAG |
| SEQ ID | GI 171460912 NG_007496 Homo sapiens | GATCCAGACAGGACT |
| NO: 932 | jagged 1 (JAG1), RefSeqGene on | AGGTCAGCCCAGTTG |
| | chromosome 20 | TTGTCTGAACAGGCT |
| | | ATCCTATAGGAAATG |
| SEQ ID | GI 48772828 AY618665 Homo sapiens | AAACGACAAGAAGCT |
| NO: 933 | VIMP mRNA, complete cds | TTAGCAGCTGCTCGA |
| | | CTGAAAATGCAAGAA |
| | | GAACTAAATGCGCAA |
| SEQ ID | GI 210032246 NG_008862 Homo sapiens | ACAAAGGGAGGGGAA |
| NO: 934 | phosphoglycerate kinase 1 | TGGTTATCAGAATTC |
| | (PGK1), RefSeqGene on chromosome X | AGAGAGGAAAGTTGG |
| | | TGTGGAGAGAGCTAT |
| SEQ ID | GI 205277388 NG_008604 Homo sapiens | CCTTGGATGACAGGC |
| NO: 935 | polycystin 2, transient receptor | ACCATAACCCTTAAC |
| | potential cation channel (PKD2), | CCACTTGGTAATCTC |
| | RefSeqGene on chromoson | TCATTTTTGGTCTGT |
| SEQ ID | GI 156104863 NM_003501 Homo sapiens | GTCTGAAATCGAAGC |
| NO: 936 | acyl-CoA oxidase 3, pristanoyl (ACOX3), | TCTAGTGGGACTGGC |
| | transcript variant 1, mRNA | ACACATTCAGCCAAG |
| | | TCTAATGAAACGAAG |
| SEQ ID | GI 66933013 NM_020139 Homo sapiens | GGTTTTGGACCGGGC |
| NO: 937 | 3-hydroxybutyrate dehydrogenase 2 | ACTACACTACCGAAT |
| | (BDH2), mRNA | TATGGCTAACTTTGG |
| | | TTTGTGATCTAGACC |
| SEQ ID | GI 392996937 NM_001008387 Homo sapiens | CTGGAAGAGAATATT |
| NO: 938 | regenerating family member 3 gamma | CTCCCCAAACTGCCC |
| | (REG3G), transcript variant 1, mRNA | TACCTGACTACCTTG |
| | | TCATGATCCTCCTTC |
| SEQ ID | GI 1049010967 AH003492 Homo sapiens | GGCCCTTCTTCCCAC |
| NO: 939 | beta-fibrinogen (FGB) gene, complete | AGCAATAGTCCCCAA |
| | cds | TACGTAGATTTTTGC |
| | | TCTTCTGTATGTGAC |
| SEQ ID | GI 226530635 NG_011844 Homo sapiens | GAGTCCCTGCTTCAG |
| NO: 940 | adenosine deaminase, RNA specific | AATCTTATTCCTGAA |
| | (ADAR), RefSeqGene on chromosome 1 | AGGTTTCCATCTTTC |
| | | TCCCGTTGCTTCTGG |
| SEQ ID | GI 190358505 NG_008040 Homo sapiens | GAAACCAGAAATCAG |
| NO: 941 | colony stimulating factor 2 receptor | GTGCCGTGTCTTCAT |
| | beta common subunit (CSF2RB), | TCTGCATTTTCTTGA |
| | RefSeqGene on chrome | ACAACCCAGAGTTCC |
| SEQ ID | GI 261823945 NG_013238 Homo sapiens | AGTCAGTAGACAAAT |
| NO: 942 | interleukin 9 receptor (IL9R), | CACTGAAGTCCATGT |
| | RefSeqGene on chromosome X and Y | CTGGCAGTTCTCAAT |
| | | GTCATGGGGACTGTA |
| SEQ ID | GI 209413721 NM_021068 Homo sapiens | GCAGTGTGAAGAAGC |
| NO: 943 | interferon alpha 4 (IFNA4), mRNA | TTGGTGTATACCTGT |
| | | GCAGGCACTAGTCCT |
| | | TTACAGATGACAATG |
| SEQ ID | GI 264681561 NM_018441 Homo sapiens | GTTCCTGGGGACAAA |
| NO: 944 | peroxisomal trans-2-enoyl-CoA | GCTTCTTTGAAGGGT |
| | reductase (PECR), mRNA | CTTTTCAGAAAATCC |
| | | CCGCTAAACGAATTG |
| SEQ ID | GI 295842487 NM_014470 Homo sapiens | CTCCCTACTACGATA |
| NO: 945 | Rho family GTPase 1 (RND1), mRNA | ATGTCCGTCCACTCT |
| | | GCTACAGCGACTCGG |
| | | ATGCAGTATTACTAT |
| SEQ ID | GI 32263626 AY325910 Homo sapiens | ATCTAAGTCATATGG |
| NO: 946 | hydroxysteroid (17-beta) | GGAAGGGAGTTCTTT |
| | dehydrogenase 2 (HSD17B2) gene, | GCAGTGAGCTGTTTC |
| | complete cds | CCAGAACACAAAAGG |
| SEQ ID | GI 13447389 AF361105 Homo sapiens | TCCTGGTGGGAGAGG |
| NO: 947 | interleukin 9 (IL9) gene, | CAGATAAAAGATCTG |
| | complete cds | CAGAAAAACAGGAGT |
| | | TCAGGAGGATTAAGA |
| SEQ ID | GI 51988875 AY744675 Homo sapiens | GCAACAGTAAGTCAC |
| NO: 948 | matrix metalloproteinase 10 | AAGTTGACTTGGCTG |
| | (stromelysin 2) (MMP10) gene, | GCTCAGTGTATATCC |
| | complete cds | CAGTTTCTCTCCAAC |
| SEQ ID | GI 226530635 NG_011844 Homo sapiens | TTCTGCCTTTTAGCT |
| NO: 949 | adenosine deaminase, RNA specific | AAATTCCCCTTGATT |
| | (ADAR), RefSeqGene on chromosome 1 | GGCCCTTTCTCCAGA |
| | | TATTGAGCAGGGAAT |
| SEQ ID | GI 261598995 NG_013210 Homo sapiens | TACACACACAGACTG |
| NO: 950 | aspartate beta-hydroxylase (ASPH), | AAATTGTGGTAAGAG |
| | RefSeqGene on chromosome 8 | TTCTGAGGAAACAAA |
| | | GCAGGAGAGCATGCC |
| SEQ ID | GI 237874181 NG_012163 Homo sapiens | TGCAGGGTAAGAGGT |
| NO: 951 | HtrA serine peptidase 2 (HTRA2), | TGTACCACATCTTGG |
| | RefSeqGene on chromosome 2 | ATAGAAAATGGCCAG |
| | | GAACTAGAAGAGGAA |
| SEQ ID | GI 429535869 NG_033019 Homo sapiens | TTTGGAAAACTGTTC |
| NO: 952 | interleukin 5 (IL5), RefSeqGene on | TGGGCAACAGTTTGT |
| | chromosome 5 | GTTTGGTACCATCTG |
| | | TTCTTGACGCTCAAG |
| SEQ ID | GI 307133693 NG_027728 Homo sapiens | TTGAATGGAGTCATT |
| NO: 953 | interferon regulatory factor 4 | TTGGCTTCTTCACTG |
| | (IRF4), RefSeqGene on chromosome 6 | GCACCTCTCTGAATT |
| | | TCTAGGAATGTGCCT |
| SEQ ID | GI 209977032 NG_008779 Homo sapiens | CAGGAGCAAGCCAAA |
| NO: 954 | paraoxonase 1 (PON1), RefSeqGene on | TCCCCAGGATAGATG |
| | chromosome 7 | CATCCTTTTTTCTTC |
| | | AGACTTGGAGTGTAT |
| SEQ ID | GI 29542 X06596 Human mRNA for | ACATAGAAGTTCCTG |
| NO: 955 | complement component Cls | AAGGGTATGGGATTC |
| | | ACCTCTACTTCACCC |
| | | ATCTGGACATTGAGC |
| SEQ ID | GI 126116577 NM_176823 Homo sapiens | CACACTCACACCTCT |
| NO: 956 | S100 calcium binding protein A7A | ATTCACAGACCAGCA |
| | (S100A7A), mRNA | TCTCCTCTCCTTATC |
| | | AGGAACATTCCTTCC |
| SEQ ID | GI 915408 U30245 Human myelomonocytic | CAGTACAAAGGGTTT |
| NO: 957 | specific protein (MNDA) gene, | ATCAGGCCCCCTATC |
| | 5′ flanking sequence and complete | ATTCCAGAGTTTCAG |
| | exon 1 | TGCTGTTCCAGAATG |
| SEQ ID | GI 310703611 NG_027845 Homo sapiens | TCCATTGGTAATGTC |
| NO: 958 | clusterin (CLU), RefSeqGene on | TGGCATGAGTAGAGA |
| | chromosome 8 | GAGTGGAGTCATCAA |
| | | AAGGATGTAGGCCAG |
| SEQ ID | GI 259013222 NG_012922 Homo sapiens | AATCAGTGCTTATTT |
| NO: 959 | glycogen synthase kinase 3 beta | TAGGAAACAGGTTGC |
| | (GSK3B), RefSeqGene on chromosome 3 | CCCCCACAACTGGGG |
| | | TAAAAGAAGAGAGAA |
| SEQ ID | GI 257467500 NG_012841 Homo sapiens | GATGGAAGGACACCT |
| NO: 960 | interleukin 13 receptor subunit | GACTTTGGAAAGAGG |
| | alpha 1 (IL13RA1), RefSeqGene | GACATCATTCTTTCC |
| | on chromosome X | TGCCAGACATTTTCT |
| SEQ ID | GI 225543321 NG_011651 Homo sapiens | GCTATGAGGATTGCA |
| NO: 961 | NLRfamily pyrin domain containing 1 | GCAGTGTTTTTCTAT |
| | (NLRP1), RefSeqGene on chromosome 17 | TCTTCTCCTGTTCCC |
| | | ACGAGCTGTGATCTG |
| SEQ ID | GI 354459375 NG_030392 Homo sapiens | AAATACTGCCCACAG |
| NO: 962 | nuclear receptor subfamily 1 group H | GTTTTGGTCTTCTCC |
| | member 3 (NR1H3), RefSeqGene on | CATTTTCCTCTCCTT |
| | chromosome 11 | TTCCCTCTTTGTAGG |
| SEQ ID | GI 20514390 AF507942 Homo sapiens | AAGCGGCACTAGGGA |
| NO: 963 | cyclin-dependent kinase 4 (CDK4) | AAAAGAGGGAAGCAC |
| | gene, complete cds | AATAACTCCAAATGA |
| | | GTAGTCACAAGGTTT |
| SEQ ID | GI 21885466 AY128534 Homo sapiens | CATGGAACCTGGAGA |
| NO: 964 | cyclin-dependent kinase 6 (CDK6) | GGGGAGTTAGCTGAT |
| | gene, complete cds | GAGATTAATGTCTGA |
| | | TAGCCTCAAGCTCTG |
| SEQ ID | GI 85725379 DQ370420 Homo sapiens | CAACGGATACGTCAT |
| NO: 965 | metallothionein 2A (MT2A) gene, | CAGTAACCACCCCAC |
| | complete cds | GGGTTTACTGTGATG |
| | | CTGCACAATTATTAA |
| SEQ ID | GI 297139781 NG_021374 Homo sapiens | CTAAAATCAGAGGAA |
| NO: 966 | early growth response 1 (EGR1), | CAATGAGGTATCCCC |
| | RefSeqGene on chromosome 5 | TTGACCTGGTATGGT |
| | | TATCAGGCCCTGAGT |
| SEQ ID | GI 539847481 NM_003837 Homo sapiens | ACTGGATGTGCTATC |
| NO: 967 | fructose-bisphosphatase 2 (FBP2), | CAATTCCCTGGTGAT |
| | mRNA | CAACATGGTCCAATC |
| | | CTCCTATAGTACCTG |
| SEQ ID | GI 166706902 NM_002053 Homo sapiens | TCTTGGGAAATATTT |
| NO: 968 | guanylate binding protein 1 (GBP1), | GGGCATTGGTCTGGC |
| | mRNA | CAAGTCTACAATGTC |
| | | CCAATATCAAGGACA |
| SEQ ID | GI 164696344 AK313967 Homo sapiens | TGAAACATTGCTCGT |
| NO: 969 | cDNA, FU94614, Homo sapiens | GTTCACTTGCACATG |
| | interleukin 18 receptor 1 (IL18R1), | AGATTGAAACAACCA |
| | mRNA | CCAAAAGCTGGTACA |
| SEQ ID | GI 221136810 NM_006931 Homo sapiens | TGAAGACTTGAATTA |
| NO: 970 | solute carrier family 2 member 3 | GATTACAGCGATGGG |
| | (SLC2A3), mRNA | GACACAGAAGGTCAC |
| | | CCCAGCTCTGATATT |
| SEQ ID | GI 262205923 NM_013444 Homo sapiens | GATTCAGAGAAACCC |
| NO: 971 | ubiquilin 2 (UBQLN2), mRNA | AGAAATCAGTCACCT |
| | | GCTCAACAACCCAGA |
| | | CATAATGAGGCAGAC |
| SEQ ID | GI 1059792660 AH007003 Homo sapiens | AGAGAAGAGGCCAGA |
| NO: 972 | MET proto-oncogene, intron 2, | AATGGGAGTTTCTCA |
| | 3′ end | ACCATTTATGCGACA |
| | | AGTCTTCAGGTGTTG |
| SEQ ID | GI 335892864 NG_029105 Homo sapiens | CCTCTGCTAGCCGTC |
| NO: 973 | interleukin 1 receptor accessory | TTCCTCTGCTGATGA |
| | protein (ILIRAP), RefSeqGene on | GTGATTTCTGTTTGA |
| | chromosome 3 | TGCAAACTTTAGCTT |
| SEQ ID | GI 645912997 NG_034139 Homo sapiens | GTGCTTCGAGGTTTT |
| NO: 974 | MHC class 1 polypeptide-related | CTGATTTTGAAGAAT |
| | sequence A (MICA), RefSeqGene | CCCAGTCAGTCAGGT |
| | on chromosome 6 | TCTGGCGTAAAGTGA |
| SEQ ID | GI 110349787 NM_018489 Homo sapiens | GCTCACTCCCAAAAA |
| NO: 975 | ASH1 like histone lysine | AGATTTCTCGCCTCA |
| | methyltransferase (ASHIL), mRNA | TTACGTCCCAGACAA |
| | | CTACAAGAGGAATGG |
| SEQ ID | GI 1002341790 NM_000043 Homo sapiens | GAGTATTACTAGAGC |
| NO: 976 | Fas cell surface death receptor | TTTGCCACCTCTCCA |
| | (FAS), transcript variant 1, mRNA | TTTTTGCCTTGGTGC |
| | | TCATCTTAATGGCCT |
| SEQ ID | GI 193290109 NG_008150 Homo sapiens | AGCTTTTATTCATGC |
| NO: 977 | checkpoint kinase 2 (CHEK2), | TACTTGTCAGTCTCC |
| | RefSeqGene on chromosome 22 | CTCAGGGTTCCTTAG |
| | | GCTGTCCTTGAGTAC |
| SEQ ID | GI 1025608661 NG_047049 Homo sapiens | GGAGGAGCTGAGAGT |
| NO: 978 | fatty acid binding protein 3 | TGGCAAATCAATAGT |
| | (FABP3), RefSeqGene on chromosome 1 | TTAGCTATGTTGCTG |
| | | AACCTTCCTGGATGG |
| SEQ ID | GI 231570519 NG_012004 Homo sapiens | AAGGTCAATGGGACG |
| NO: 979 | kinase insert domain receptor | ATCACTTCAGTGAGC |
| | (KDR), RefSeqGene on chromosome 4 | AGATAGCTCTGTAAA |
| | | TTCCTCCATAGAGGC |
| SEQ ID | GI 1049010846 AH002874 Homo sapiens | CACATTTGCCTTTGA |
| NO: 980 | MC-CPA gene, complete sequence; | GCTCCGAGATAAAGG |
| | and carboxypeptidase A (CPA3) | CAAATTTGGTTTTCT |
| | gene, complete cds | CCTTCCAGAATCCCG |
| SEQ ID | GI 67515420 DQ088846 Homo sapiens | ATTCTGAGGTTGCAT |
| NO: 981 | myeloperoxidase (MPO) gene, | CCAATTTTAGCAGGA |
| | complete cds | AAGAGTGCTGTGATC |
| | | GTTAGCTGCATCAGA |
| SEQ ID | GI 1147489694 NG_016780 Homo sapiens | GCTAACAGGATTAGC |
| NO: 982 | acyl-CoA thioesterase 9 (ACOT9), | CCAGGTGCTGGTGGA |
| | RefSeqGene on chromosome X | AGAAAGGAGGAACTA |
| | | TTGAAAGGTTTGAAT |
| SEQ ID | GI 1031698869 NG_050687 Homo sapiens | GCATGAATTCAAGTA |
| NO: 983 | HOP homeobox (HOPX), RefSeqGene on | TAGCTGTCATCTCAG |
| | chromosome 4 | TCTTCCTGCCTCATC |
| | | AAGTCAAGTGCAGCG |
| SEQ ID | GI 240255451 NG_012330 Homo sapiens | CTACAGCCCTCTGGT |
| NO: 984 | MYB proto-oncogene, transcription | CAGCAGCACCAACTT |
| | factor (MYB), RefSeqGene on | TCTCACGGAGTTAAA |
| | chromosome 6 | TTAGTTTGGGTTATG |
| SEQ ID | GI 291084846 NG_016762 Homo sapiens | GAGGAGTCATGTGAA |
| NO: 985 | pyruvate dehydrogenase kinase 3 | GGAAAGCTACCTTTA |
| | (PDK3), RefSeqGene on chromosome X | GTCCTCCATCGCAAT |
| | | ACTGTCCAGTGTCTC |
| SEQ ID | GI 206725542 NG_008631 Homo sapiens | CTTCAGACAGTGCCA |
| NO: 986 | patatin like phospholipase domain | GTCCTTTTTCCCCTT |
| | containing 3 (PNPLA3), RefSeqGene | CTTTAAAAGCGATAT |
| | on chromosome 22 | GTGGATGGAGGAGTG |
| SEQ ID | GI 238018078 NG_012202 Homo sapiens | GACATTGAAAAAACA |
| NO: 987 | TNF receptor superfamily member | ATAAAGGCATGCAAA |
| | 11b (TNFRSF11B), RefSeqGene on | CCCAGTGACCAGATC |
| | chromosome 8 | CTGAAGCTGCTCAGT |
| SEQ ID | GI 219521851 NG_009233 Homo sapiens | TTTTTATGTCAGTGC |
| NO: 988 | tyrosine 3-monooxygenase/tryptophan | CTGATGCTGTGCCCT |
| | 5-monooxygenase activation protein | TTTCTTCCCTTGGTG |
| | epsilon (YWHA | TGATTGCTTTTACTG |
| SEQ ID | GI 45243506 NM_002935 Homo sapiens | AGTATACGCTGCCCT |
| NO: 989 | ribonuclease A family member 3 | CATAACAGAACTCTC |
| | (RNASE3), mRNA | AACAATTGTCATCGG |
| | | AGTAGATTCCGGGTG |
| SEQ ID | GI 27369416 AY166858 Homo sapiens | AAGTTCTCAGTAATG |
| NO: 990 | TGS1 mRNA, complete cds | AACCTCATGAGACAA |
| | | TGCCAATTGCTGCCT |
| | | TGGGACAAAAACAGC |
| SEQ ID | GI 1036032792 AH002827 Homo sapiens | GAGAGTACTTTTGAA |
| NO: 991 | hemopexin (HPX) gene, complete cds | TGCAGGGGGACAAAG |
| | | TCTGGGTATACCCTC |
| | | CTGAAAAGAAGGAGA |
| SEQ ID | GI 82583661 DQ297144 Homo sapiens | AGTTTGATCTCAAAA |
| NO: 992 | metallothionein 3 (growth inhibitory | TCTCCCCAGCTCACG |
| | factor (neurotrophic)) (MT3) gene, | GCAGTGTAATATGCA |
| | complete cds | TAGGGAGTAAGAGGT |
| SEQ ID | GI 1064244211 NG_051562 Homo sapiens | AAGCTACCAACAAAG |
| NO: 993 | ChaC glutathione specific gamma- | GAGGTGCTCATATGA |
| | glutamylcyclotransferase 1 (CHAC1), | ACGAAAGGGGACAGG |
| | RefSeqGene on chr [symbol] | ATAGAAGAGAAGAGG |
| SEQ ID | GI 238018116 NG_012218 Homo sapiens | TCTCACACCAGGATG |
| NO: 994 | hexose-6-phosphate dehydrogenase/glucose | ACTGGGTCTTAGCAC |
| | 1-dehydrogenase (H6PD), RefSeqGene | GACCTAATCGTCTTC |
| | on chro [symbol] | ATGATGGAAAGAAAG |
| SEQ ID | GI 254911080 NG_012514 Homo sapiens | CTTGTGAAAAACTCC |
| NO: 995 | interleukin 13 receptor subunit alpha 2 | GGTGTTCCTGGTAAC |
| | (IL13RA2), RefSeqGene on chromosome X | CACATAGTGTATAAA |
| | | GCCCCTCATTGCACT |
| SEQ ID | GI 908212454 NG_042284 Homo sapiens | TTTGGGGTTCCTCAG |
| NO: 996 | SMAD family member 1 (SMAD1), | CGCTATGAGGCTACT |
| | RefSeqGene on chromosome 4 | AGAAGCTCTGCTTAG |
| | | TTTTTAGCCTCTTAG |
| SEQ ID | GI 189458878 NM_139166 Homo sapiens | CCTGTCTTAGTACCA |
| NO: 997 | actin binding Rho activating protein | ACAAAGGAAGGCACA |
| | (ABRA), mRNA | CCCTCACTAAAAGTA |
| | | GAGCAGAGGTGAGAG |
| SEQ ID | GI 164695701 AK315511 Homo sapiens | GTGATGGTTTCTCGA |
| NO: 998 | cDNA, FLI96576, Homo sapiens | GCAGAAATTGACATG |
| | annexin A4 (ANXA4), mRNA | TTGGATATCCGGGCA |
| | | CACTTCAAGAGACTC |
| SEQ ID | GI 166795249 NM_006845 Homo sapiens | CAATAAACCCAGAAC |
| NO: 999 | kinesin family member 2C | TCTTACAGCTTCTTC |
| | (KIF2C), transcript variant 1, mRNA | CCTTACATCCGAAGG |
| | | ACAATCTGCCCTTGC |
| SEQ ID | GI 571330780 NM_001136022 Homo sapiens | CTTCAGCACCACCTC |
| NO: 1000 | nuclear factor of activated T-cells 4 | TAAGATCTCTGAGAG |
| | (NFATC4), transcript variant 1, mRNA | AGGGTGGATCAGCCT |
| | | CTGTGTAAACAAAAA |
| SEQ ID | GI 40288420 AY505111 Homo sapiens | GGCGATATGGAACAA |
| NO: 1001 | arachidonate 15-lipoxygenase (ALOX15) | CAGAGAGGAAATTCA |
| | gene, complete cds | TGGGATTAAGGGCAG |
| | | ATAGGCTTGGATGTG |
| SEQ ID | GI 1036032759 AH002916 Homo sapiens | CTTTATTGCTGATGA |
| NO: 1002 | ornithine aminotransferase (OAT) gene, | AATACAGACAGGATT |
| | complete cds | GGCCAGAACTGGTAG |
| | | ATGGCTGGCTGTTGA |
| SEQ ID | GI 223890186 NG_009797 Homo sapiens | AGAGATGCTTTTCCC |
| NO: 1003 | junctophilin 3 (JPH3), RefSeqGene on | GACGTGAATGGAATA |
| | chromosome 16 | TTCTGAGGATTAGGA |
| | | CGTGGACCTACCTTG |
| SEQ ID | GI 916539820 NG_042809 Homo sapiens | CTGGTAGTTCTGTAA |
| NO: 1004 | potassium voltage-gated channel | TTAAGCAAGTGACCA |
| | subfamily J member 12 (KCNJ12), | CCCCTCTGTGCCTCA |
| | RefSeqGene on chromos | GTTCCTTCATCTGTA |
| SEQ ID | GI 584613557 NG_033959 Homo sapiens | GAAAAAGATGCCTGT |
| NO: 1005 | poly(ADP-ribose) polymerase 2 (PARP2), | GGCTGGAGGAAAAGC |
| | RefSeqGene on chromosome 14 | TAATAAGGACAGGAC |
| | | AGAAGACAAGCAAGA |
| SEQ ID | GI 90657247 DQ449938 Homo sapiens | TCCTTCCCAGACCTG |
| NO: 1006 | Fas (TNFRSF6)-associated via death | TGTGCAGCATTTAAC |
| | domain (FADD) gene, complete cds | GTCATATGTGATAAT |
| | | GTGGGGAAAGATTGG |
| SEQ ID | GI 31559181 AY310878 Homo sapiens | GGGATCCTAGTAACT |
| NO: 1007 | glutathione peroxidase 3 (plasma) | GCTGGTTTCTAGGTG |
| | (GPX3) gene, complete cds | ACTAAACCTGGCAGA |
| | | GAGAATCATGGAACC |
| SEQ ID | GI 1024846757 NG_047018 Homo sapiens | TGTGCAAGTCACTTT |
| NO: 1008 | histone deacetylase 1 (HDAC1), | TCCCCTGTAGGCCTC |
| | RefSeqGene on chromosome 1 | GGTTTATTCTCCGTA |
| | | AAATCAGAAAGTTGG |
| SEQ ID | GI 342307067 NG_029605 Homo sapiens | TTACACCCAGCGTTT |
| NO: 1009 | interleukin 15 (IL15), RefSeqGene on | CTTTAATAGGAGTGG |
| | chromosome 4 | AGTAGGGTTGTTTAC |
| | | AAAGGCCCTGGTCTA |
| SEQ ID | GI 365777421 NG_031966 Homo sapiens | TATAAAGCCAATTCC |
| NO: 1010 | interleukin 21 (IL21), RefSeqGene on | CGCAGTTATTTATCC |
| | chromosome 4 | TGGACCACATATTGC |
| | | CAGACACAGCTCTGC |
| SEQ ID | GI 210032137 NG_008855 Homo sapiens | TTTCCAGGCTGTCTT |
| NO: 1011 | lipoprotein lipase (LPL), RefSeqGene | CTGAGTTGAACATGA |
| | on chromosome 8 | TGGCAAAGGAGAGCA |
| | | AAATAGCAGATGTCA |
| SEQ ID | GI 1140398720 NG_052834 Homo sapiens | ATTCCTTTGCTGCCT |
| NO: 1012 | TNF receptor superfamily member 9 | CTTATCTTCTCTCAT |
| | (TNFRSF9), RefSeqGene on chromosome 1 | TGATCAGCCTGTCTC |
| | | CATGTGTTCAATGCC |
| SEQ ID | GI 727346118 NM_002728 Homo sapiens | TTCTCCTCTGATCGC |
| NO: 1013 | proteoglycan 2, pro eosinophil major | GGATCCACTCTGCTT |
| | basic protein (PRG2), transcript | AGCCCTCATTGAAAC |
| | variant 1, mRNA | TTCTTCCTTATCATC |
| SEQ ID | GI 77744386 DQ230907 Homo sapiens | CCACTAGACTGAAAG |
| NO: 1014 | nudix (nucleoside diphosphate linked | AAGTTCCTGTTAATC |
| | moiety X)-type motif 1 (NUDT1) gene, | CAAAGGCCTGACCTG |
| | complete cds | AGGACCACAGGATAA |
| SEQ ID | ref \| NG_009824.2\| Homo sapiens | TATGGGCTCTACGAG |
| NO: 1015 | crystallin alpha B (CRYAB), | AATCTGTGAAACCCA |
| | RefSeqGene on chromosome | TCATTCTTGTGTTCA |
| | | GTTCTCTCACCCCAT |
| SEQ ID | GI 260763953 NG_013056 Homo sapiens | GATGAGGAAGAATAA |
| NO: 1016 | chitinase 3 like 1 (CHI3L1), | AGCAGTCAAAGAAGA |
| | RefSeqGene on chromosome 1 | GCAGTGTTAGGCTGC |
| | | AATTCTCCATCCGCA |
| SEQ ID | GI 260763953 NG_013056 Homo sapiens | GGAACGTAATCGTGT |
| NO: 1017 | chitinase 3 like 1 (CHI3L1), | CCCCTATCCTACTTC |
| | RefSeqGene on chromosome 1 | CCCTTCCTAATTCCA |
| | | CAGCTGCTCAATAAA |
| SEQ ID | GI 307133762 NG_027719 Homo sapiens | GGATGTATGTGGAAA |
| NO: 1018 | glutathione-disulfide reductase | AGCTCTTCTTACTCC |
| | (GSR), RefSeqGene on chromosome 8 | AGGTAAGGTCTCTTC |
| | | CCTTCTTGGTGAGGG |
| SEQ ID | GI 315013554 NG_027996 Homo sapiens | TAGGATTTGCATCAG |
| NO: 1019 | granzyme A (GZMA), RefSeqGene on | ATGTCTGCGGGTCTA |
| | chromosome 5 | CATAGAGTAAAAGCA |
| | | GGGGAAATGCTCTCA |
| SEQ ID | GI 297515475 NG_021404 Homo sapiens | GGAAAAGATTGGTTT |
| NO: 1020 | matrix metallopeptidase 13 (MMP13), | AGAGAAGGCCCTCCT |
| | RefSeqGene on chromosome 11 | ATCTGCAGAGTTAGC |
| | | TGATCCACTGGAGAG |
| SEQ ID | GI 190014585 NM_021144 Homo sapiens | CTTGATACAGACTCA |
| NO: 1021 | PC4 and SFRS1 interacting protein 1 | TTGGACTGAATTTCC |
| | (PSIP1), transcript variant 1, mRNA | CCCTTCCCCCCATTG |
| | | ATGGAAGAATGTTCC |
| SEQ ID | GI 189909140 EU779708 Homo sapiens | ATGGCAGTTTTTTGG |
| NO: 1022 | protein tyrosine phosphatase-2 | CAAGGCCTAGTAAAA |
| | (PTPN11) mRNA, complete cds | GTAACCCTGGAGACT |
| | | TCACACTTTCCGTTA |
| SEQ ID | GI 1209857163 NM_015317 Homo sapiens | AGCAGCAGCTCTTTC |
| NO: 1023 | pumilio RNA binding family member 2 | AGAGGACTAATGCAC |
| | (PUM2), transcript variant 1, mRNA | TAACAGTTCAACAGT |
| | | TAACTGCAGCTCAAC |
| SEQ ID | GI 1209857163 NM_015317 Homo sapiens | TATTTCGGCCCGTAT |
| NO: 1024 | pumilio RNA binding family member 2 | CGAACTTTTGTTCTC |
| | (PUM2), transcript variant 1, mRNA | AGTATCAGCCCATGG |
| | | TTTCAGGATCAAAGC |
| SEQ ID | GI 115432768 DQ995342 Homo sapiens | AAGACTGGTCGGTTT |
| NO: 1025 | ADAM metallopeptidase domain 33 | GCATATGAAAGGCAT |
| | (ADAM33) gene, complete cds | GAGTTGTTTCTGATC |
| | | TCCAGGAATCAAGCA |
| SEQ ID | GI 37675288 AY436640 Homo sapiens | GAGTTCAGGTGAAGA |
| NO: 1026 | breast cancer 2, early onset | TGTGAAGGTGAGAGA |
| | (BRCA2) gene, complete cds | AGAGGATGGGTAGAC |
| | | ATTTCCCTGGTGAAG |
| SEQ ID | GI 58802450 AY916056 Homo sapiens | CAGTGGTGGTCAGGA |
| NO: 1027 | flavin containing monooxygenase 2 | ATAGCAAAAACTAAA |
| | (FM02) gene, complete cds | CTCCTTCTGCAAGGA |
| | | CAGACCTAGGCAAAG |
| SEQ ID | GI 221139813 NG_009361 Homo sapiens | CACAAGAAGCAAAAC |
| NO: 1028 | BCL2, apoptosis regulator (BCL2), | GCTGGAGAGGGACAG |
| | RefSeqGene on chromosome 18 | ATGTCTACAGAAGAT |
| | | GTTTTGGGACAGTTT |
| SEQ ID | GI 197313719 NG_008421 Homo sapiens | CTGTCTAACTTGCTA |
| NO: 1029 | cytochrome P450 family 3 subfamily | TCTATGGCAGGACCT |
| | A member 4 (CYP3A4), RefSeqGene on | TTGAAGGGTTCACAG |
| | chromosome 7 | GAAGCAGCACAAATT |
| SEQ ID | GI 197313719 NG_008421 Homo sapiens | AACATAAAGACAGCT |
| NO: 1030 | cytochrome P450 family 3 subfamily | TGTCTGAGGCAACAT |
| | A member 4 (CYP3A4), RefSeqGene | ACAATCCACCAAAGT |
| | on chromosome 7 | CACCTGCTTGTCTGT |
| SEQ ID | GI 345525392 NG_029921 Homo sapiens | AGTGAGCCCCATTCT |
| NO: 1031 | major histocompatibility complex, | GTGACAATCAGTAGG |
| | class II, DR beta 1 (HLA-DRB1), | ACTCAAGACATGCTG |
| | RefSeqGene on chromoso [symbol] | TAATCCTACCAATGT |
| SEQ ID | GI 224809291 NG_011495 Homo sapiens | TTGTTCTTTCTCAGC |
| NO: 1032 | interferon induced with helicase C | CACCACAGCTATTCC |
| | domain 1 (IFIH1), RefSeqGene on | AGCAGCTCATTTCTT |
| | chromosome 2 | CACTTCACATCTGTT |
| SEQ ID | GI 974987494 NG_011716 Homo sapiens | TCACAGTAAAAATGC |
| NO: 1033 | transcription factor 4 (TCF4), | TCTTTCCCCAGGTAC |
| | RefSeqGene on chromosome 18 | AGGATATATGGCCAT |
| | | CTGGCCTGGATATCA |
| SEQ ID | GI 14594701 AY037115 Homo sapiens | GTCTGGAACAAGTGT |
| NO: 1034 | thymic stromal lymphopoietin (TSLP) | CACAATTACAAGGAT |
| | mRNA, complete cds | TGTGGCGTCGCTTCA |
| | | ATCGACCTTTACTGA |
| SEQ ID | GI 58258007 AY902236 Homo sapiens | CAATGCTCATGTGAC |
| NO: 1035 | flavin containing monooxygenase 5 | AGCACACTCAAGTCA |
| | (FMO5) gene, complete cds | CAGTGGCTCATGGTA |
| | | TGAATAGTCACTGTG |
| SEQ ID | GI 166706816 EU332867 Homo sapiens | TTTCCTGGGGAGTTG |
| NO: 1036 | protein kinase C, epsilon (PRKCE) | ATTAAAGTTACAGAT |
| | gene, complete cds | TTTCAAGCCTCACCC |
| | | AGTGGAATTGGGGAG |
| SEQ ID | GI 212549766 NG_008985 Homo sapiens | GAAGGTGGGGCAATT |
| NO: 1037 | N-acylsphingosine amidohydrolase | CTGACTGAGTAAAGA |
| | 1 (ASAH1), RefSeqGene on | AGGAACAGCCATTCT |
| | chromosome 8 | GTTTAGCACGAGAAG |
| SEQ ID | GI 223671920 NG_009776 Homo sapiens | CACCTCTGGCGTTAA |
| NO: 1038 | epoxide hydrolase 1 (EPHX1), | GTCCTGACTCCTACC |
| | RefSeqGene on chromosome 1 | TGTTTCACCATCACT |
| | | GCAGTTTTAAGAGTA |
| SEQ ID | GI 570359607 NG_033871 Homo sapiens | GGGCTCAGGGAAGAA |
| NO: 1039 | F-box protein 38 (FBX038), | GAGAAGTAAGGATTA |
| | RefSeqGene on chromosome 5 | TAAGTCTACAGTGGA |
| | | GGCTTCAGTTGTGGC |
| SEQ ID | GI 341865572 NG_029566 Homo sapiens | GAAGGAGCCTTCTGA |
| NO: 1040 | nucleolar protein 3 (NOL3), | AGCAAATATCAGAGT |
| | RefSeqGene on chromosome 16 | CACTCCTCTGCTTAA |
| | | AGCTCCTCTCACTCC |
| SEQ ID | GI 1047600468 NM_001718 Homo sapiens | GCAATGCTCACCTCT |
| NO: 1041 | bone morphogenetic protein 6 | TCTTTACCAGAACGG |
| | (BMP6), mRNA | TTCTTTGACCAGCAC |
| | | ATTAACTTCTGGACT |
| SEQ ID | GI 428673540 NM_006273 Homo sapiens | CAGTGCTGTAAAAAC |
| NO: 1042 | C-C motif chemokine ligand 7 | TGTGGGATGCTCCTC |
| | (CCL7), mRNA | CCTTCTCTACCTCAT |
| | | GGGGGTATTGTATAA |
| SEQ ID | GI 14518294 AF390905 Homo sapiens | TGTCCCACCGTTAAC |
| NO: 1043 | interleukin 19 (IL19) gene, | CACTCCCTGCTTAGA |
| | complete cds | CTGAACAGTTAATCT |
| | | TCTGCAGAGTAACTG |
| SEQ ID | GI 14278707 AF365976 Homo sapiens | ACATCCAATCCATAT |
| NO: 1044 | interleukin 3 (IL3) gene, | CAAGGACGGTGACTG |
| | complete cds | GAATGAATTCCGGAG |
| | | GAAACTGACGTTCTA |
| SEQ ID | GI 94717611 DQ520733 Homo sapiens | CCTTGAGTTGTTGCA |
| NO: 1045 | UDP glucuronosyltransferase 2 | AGAAAGAATACTCCA |
| | family, polypeptide B4 (UGT2B4) | AGTGTGGGTAGAGGG |
| | gene, complete cds | GACGCAATGTGTAAG |
| SEQ ID | GI 983173900 NG_009770 Homo sapiens | CTGGAAACCAGTGAA |
| NO: 1046 | hexosaminidase subunit beta (HEXB), | AATTTCTGAGCAGAG |
| | RefSeqGene on chromosome 5 | GAGTAACATGATGGG |
| | | AACCACACTTTGGGA |
| SEQ ID | GI 342307070 NG_029606 Homo sapiens | GTTAGCCTTTGGTAG |
| NO: 1047 | hypoxia inducible factor 1 alpha | ATTCATCTGGTTAGG |
| | subunit (HIF1A), RefSeqGene on | CTCTGATAGAGAGTT |
| | chromosome 14 | TCCCTTGAGGCCAGG |
| SEQ ID | GI 335334929 NG_012849 Homo sapiens | TGGAAAAGAATTGGG |
| NO: 1048 | phosphoinositide-3-kinase regulatory | GTAGGGGTGTGGCAC |
| | subunit 1 (PIK3R1), RefSeqGene on | ATGGCACTTAAGTTG |
| | chromosome 5 | AGGTTTATGTTAGAG |
| SEQ ID | GI 341823644 NG_029509 Homo sapiens | AATCAAGGAACCCAC |
| NO: 1049 | prostaglandin E receptor 3 (PTGER3), | ACAGAAGGTGATCTC |
| | RefSeqGene on chromosome 1 | CATTGCTAACTGACC |
| | | AGCAAATTACACAGG |
| SEQ ID | GI 1024336768 NG_046906 Homo sapiens | CTGGATCATTTATTG |
| NO: 1050 | TANK binding kinase 1 (TBK1), | CCTGTATTGCTGACC |
| | RefSeqGene on chromosome 12 | TTTAGTCCCCAGCTC |
| | | CTTCCAGAAGTTTGG |
| SEQ ID | GI 169646347 NM_001115152 Homo sapiens | CGTGTTCACCGTGAC |
| NO: 1051 | CD300 molecule like family member d | CATGGAGAATCTCAA |
| | (CD300LD), mRNA | AAGAGATGATGCTGA |
| | | CAGTTATTGGTGTGG |
| SEQ ID | GI 974005408 NM_015133 Homo sapiens | GATTCTCCTCAGGCT |
| NO: 1052 | mitogen-activated protein kinase 8 | TTGGCCCTGCAAGCA |
| | interacting protein 3 (MAPK8IP3), | AACCCACATATCTGC |
| | transcript variant 1, [symbol] | TCTGTATGTAATAAA |
| SEQ ID | GI 740086238 NM_017921 Homo sapiens | CCTTATCCACCACGC |
| NO: 1053 | NPL4 homolog, ubiquitin recognition | TATTATAGTTTCCGT |
| | factor (NPLOC4), transcript variant | TGTCCTCCACCAGCA |
| | 1, mRNA | TTTCCCTTACTCTGA |
| SEQ ID | GI 38505193 NM_000955 Homo sapiens | GTGCGCGGCGCAGAG |
| NO: 1054 | prostaglandin E receptor 1 (PTGER1), | CCTTTGGGAATAAAA |
| | mRNA | AGCCATTCTGCGAAA |
| | | AAAAAAAAAAAAAAA |
| SEQ ID | GI 394582046 NM_003877 Homo sapiens | AAAGGTCCAGGCTCC |
| NO: 1055 | suppressor of cytokine signaling 2 | AGTAGGAGAGAAAGA |
| | (SOCS2), transcript variant 1, mRNA | ACTCCTCATAGGAAT |
| | | ACTGAAGAAGTGGGA |
| SEQ ID | ref \| NG_034014.1\| Homo sapiens | TCAGGGAAAGTGCCT |
| NO: 1056 | cyclin dependent kinase 2 (CDK2), | ATTGTAAAAAGAACT |
| | RefSeqGene on | GAGGGTGCTATGGTG |
| | | TTGAGCTGAGAGAGA |
| SEQ ID | GI 340523111 NG_029470 Homo sapiens | AGACCCATTAAGTAT |
| NO: 1057 | enolase 1 (ENO1), RefSeqGene on | ATTAATGAGTTCCTG |
| | chromosome 1 | GCACCAGCCCTGTGC |
| | | ACTCAGGTAACTGAT |
| SEQ ID | GI 383087750 NG_015839 Homo sapiens | CGAATTATAATTCCT |
| NO: 1058 | ERCC excision repair 1, endonuclease | CAAGCCCTCTTTCCC |
| | non-catalytic subunit (ERCC1), | CTCCCATCCTTTGCC |
| | RefSeqGene on chromo [symbol] | CATGCTGTTCTTTAT |
| SEQ ID | GI 237858716 NG_012099 Homo sapiens | AGGGACAAGGGAAAA |
| NO: 1059 | macrophage migration inhibitory factor | ATCCACTTCCAAGTT |
| | (MIF), RefSeqGene on chromosome 22 | CAATCTGGTTGTGAG |
| | | CAGAATTCAGTTCCT |
| SEQ ID | GI 343403834 NG_029695 Homo sapiens | ACAGGGTAAGTTTTT |
| NO: 1060 | prefoldin subunit 5 (PFDN5), RefSeqGene | CCTGGGGCACCTCTT |
| | on chromosome 12 | GACCCTATCTCCATA |
| | | ATAAGGAACATGGAT |
| SEQ ID | GI 1018443413 NG_027814 Homo sapiens | ACAATACTTGAACCA |
| NO: 1061 | SATB homeobox 1 (SATB1), RefSeqGene | CCCTCCCCCTGTCAG |
| | on chromosome 3 | TAGATCTATGAATAA |
| | | GCCTTTGGAGCAACA |
| SEQ ID | GI 238814313 NG_012262 Homo sapiens | TTTTGGTACCCATTT |
| NO: 1062 | topoisomerase (DNA) 1 (TOP1), | GATACACTGTGGCTG |
| | RefSeqGene on chromosome 20 | GTAGGTAAGTAGGTT |
| | | GGTGTAAGTGGACCT |
| SEQ ID | GI 211971007 NM_001136538 Homo sapiens | GGCCCATTGGAACTA |
| NO: 1063 | acyl-CoA dehydrogenase family member 10 | CTTCAGTTTGATCAC |
| | (ACAD10), transcript variant 1, mRNA | GGGCAGTCAAATCCA |
| | | ACTTACTACATCAGG |
| SEQ ID | GI 38708325 NM_001896 Homo sapiens | TGCGACTGATAGATT |
| NO: 1064 | casein kinase 2 alpha 2 (CSNK2A2), | GGGGTCTGGCAGAAT |
| | mRNA | TCTATCATCCTGCTC |
| | | AGGAGTACAATGTTC |
| SEQ ID | GI 576795860 NM_001549 Homo sapiens | CGCTACTGCAACCTT |
| NO: 1065 | interferon induced protein with | CAGAAATATAATGGG |
| | tetratricopeptide repeats 3 | AAGTCTGAAGACACT |
| | (1 FITS), transcript variant 1, mR [symbol] | GCTGTGCAACATGGT |
| SEQ ID | GI 633257761 NM_001143836 Homo sapiens | TCATGGTGGATTCAA |
| NO: 1066 | NADPH oxidase 4 (NOX4), transcript | GAACTCCCTAGTGAG |
| | variant NOX4B, mRNA | GAGCTGAACTTGCTC |
| | | AATCTAAGGCTGATT |
| SEQ ID | GI 23510408 NM_003057 Homo sapiens | AAAGAATGGGAAGTT |
| NO: 1067 | solute carrier family 22 member 1 | GCCTCCTGCTGATTT |
| | (SLC22A1), transcript variant 1, mRNA | AAAGATGCTTTCCCT |
| | | CGAAGAGGATGTCAC |
| SEQ ID | GI 315360639 NM_012474 Homo sapiens | CTTCCTGATAGAAGA |
| NO: 1068 | uridine-cytidine kinase 2 (UCK2) | TGGGAAGGAGAGGGC |
| | , mRNA | AGAACTTTGCCTGCT |
| | | GTCATATCTGAAGAA |
| SEQ ID | GI 94717638 DQ496106 Homo sapiens | AAGTGAAAACACACA |
| NO: 1069 | aconitase 1, soluble (ACO1) gene, | GTATCTCTAAGGCCT |
| | complete cds | AGCTAAGGACCAGCA |
| | | CAGCATCACTTCTGT |
| SEQ ID | GI 87046146 DQ142911 Homo sapiens | TGCCTGATCTTTGCA |
| NO: 1070 | cogulation factor VII (F7) gene, | AAATCAGGAGCATTG |
| | complete cds | GATCAAAGCTATGTG |
| | | AAGATCCTGTGAGGT |
| SEQ ID | GI 77702091 DQ217939 Homo sapiens | CTCTTTGGATCACCA |
| NO: 1071 | mannose-binding protein C (MBL2) | GCTTTCAGCTCAGGG |
| | gene, complete cds | CCTGCCAATGAGTAA |
| | | ATGATAGTTAACAGG |
| SEQ ID | GI 14278706 AF378903 Homo sapiens | ACATAAAATCGCTCA |
| NO: 1072 | protein C (PROC) gene, complete cds | CTCTGTGCCTCACAT |
| | | CAAAGGGAGAAAATC |
| | | TGATTGTTCAGGGGG |
| SEQ ID | GI 1206876284 NG_033870 Homo sapiens | TACACTGAGGCTGCT |
| NO: 1073 | asparagine synthetase (glutamine- | TTAAGTTGCACATTG |
| | hydrolyzing) (ASNS), RefSeqGene | ATCTGAAGCCTTGGG |
| | on chromosome 7 | CTTCTGTTCCTATTC |
| SEQ ID | GI 654825103 NG_029876 Homo sapiens | GCTCTCTTGGTATCC |
| NO: 1074 | C-C motif chemokine ligand 23 (CCL23), | GTCTTTGTCTGGCAT |
| | RefSeqGene on chromosome 17 | CTAGGAAGAATCAGG |
| | | TCACATCAACCTGAA |
| SEQ ID | GI 190358507 NG_008042 Homo sapiens | TGAGTTAACGAGGCC |
| NO: 1075 | 2,4-dienoyl-CoA reductase 1 (DECR1), | TGTGGCAAGCTTTTG |
| | RefSeqGene on chromosome 8 | GTGTGGTACTCAGTT |
| | | ATTTTAATGTCTGCA |
| SEQ ID | GI 212549732 NG_008981 Homo sapiens | GTTGTAAATATTTTA |
| NO: 1076 | growth differentiation factor 6 | TGGGAAGGCAGCCCA |
| | (GDF6), RefSeqGene on chromosome 8 | GGAAAATCTGGTTAG |
| | | CTTTCCGCCTTGCAC |
| SEQ ID | GI 254911084 NG_012516 Homo sapiens | ACTCACATCTGTATG |
| NO: 1077 | moesin (MSN), RefSeqGene on | CAAATGCAGCATCCT |
| | chromosome X | CTCAACCATGCCTCT |
| | | TCTTTTCCTCAAGTT |
| SEQ ID | GI 224809269 NG_011475 Homo sapiens | TAATATTGACAGGAA |
| NO: 1078 | toll like receptor 4 (TLR4), | ACCCCATCCAGAGTT |
| | RefSeqGene on chromosome 9 | TAGCCCTGGGAGCCT |
| | | TTTCTGGACTATCAA |
| SEQ ID | GI 1010228574 NM_001321573 Homo sapiens | AGGGGTACCCAGATA |
| NO: 1079 | calcium/calmodulin dependent protein | GTCCTTGTTTTAATG |
| | kinase II delta (CAMK2D), transcript | ATGGGTTCTCTCACC |
| | variant 14, | ACTGTCTTGATGCTC |
| SEQ ID | GI 50234968 AY665769 Homo sapiens | GAAAGTGCTTTTCTG |
| NO: 1080 | chemokine-like factor (CKLF) gene, | CTAGAAAAGCAGCAG |
| | complete cds | CATATGTGAGGGTCT |
| | | AGGTGGAGAAAGAGC |
| SEQ ID | GI 440503006 JX512449 Homo sapiens | GGTGCCTCAGTTTTC |
| NO: 1081 | mitogen-activated protein kinase 1 | TCTGTAGCACCCTCA |
| | (MAPK1) gene, complete cds | AGAAGATATGCTGAG |
| | | AGTAATGAGGGTCAG |
| SEQ ID | GI 1049011036 AH002959 Homo sapiens | GCCTCCCCAGATCTT |
| NO: 1082 | RAF1 | AGTAAGCTATATAAG |
| | (RAF1) gene, complete cds | AACTGCCCCAAAGCA |
| | | ATGAAGAGGCTGGTA |
| SEQ ID | GI 344925847 NG_029819 Homo sapiens | CAATCCCAGCTGACA |
| NO: 1083 | prolactin | GCCAGTATCAACTAA |
| | (PRL), RefSeqGene on chromosome 6 | CAAACATGGTTTGTT |
| | | TAGCTCTAGCCACCA |
| SEQ ID | GI 149274622 NM_032579 Homo sapiens | TCTAGAGTACAGTCC |
| NO: 1084 | resistin like beta | CTCTCCTATAAGCAA |
| | (RETNLB), mRNA | GAAGCTCTCGTGTGC |
| | | TAGTGTCAAAAGCCA |
| SEQ ID | GI 94717638 DQ496106 Homo sapiens | CTGTAGCATGGGCTG |
| NO: 1085 | aconitase 1, soluble | CATGATGTTCTGATT |
| | (ACO1) gene, complete cds | TCTCCTACACAGTCT |
| | | CCATTCTCAGTCTGA |
| SEQ ID | GI 294489317 NG_017064 Homo sapiens | CCCTAGGAAGGGGGA |
| NO: 1086 | acyl-CoA dehydrogenase family member 9 | AACGCTACTGTGTTT |
| | (ACAD9), RefSeqGene on chromosome 3 | ACTCCTATTTTGTAG |
| | | ATGAGCACACTGAGG |
| SEQ ID | GI 190194409 NG_008004 Homo sapiens | GGGTTTTAGCCTTGG |
| NO: 1087 | activin A receptor type 1 | GCTGGAGAAGCCATA |
| | (ACVR1), RefSeqGene on chromosome 2 | GGGCTTGGTGAATAA |
| | | ATTACTTTTGCAATG |
| SEQ ID | GI 219842221 NG_009291 Homo sapiens | GAATGTGCTGATGAC |
| NO: 1088 | albumin | AGGGTAAAGAGTCGT |
| | (ALB), RefSeqGene on chromosome 4 | CGATATGCTTTTTGG |
| | | TAGCTTGCATGCTCA |
| SEQ ID | GI 1025608649 NG_047040 Homo sapiens | GAGAACAGTATAGCC |
| NO: 1089 | calcium/calmodulin dependent | CAGGATTGAAAGCCC |
| | protein kinase 11 alpha | AGCTCTGGAGTCTAA |
| | (CAMK2A), RefSeqGene on chromos [symbol] | CTGTCTGGGTAAAAA |
| SEQ ID | GI 324021728 NG_028155 Homo sapiens | GCAACTATTATAAGA |
| NO: 1090 | indoleamine 2,3-dioxygenase 1 | TGCTCTGAAAACTCT |
| | (IDO1), RefSeqGene on chromosome 8 | TCAGACACTGAGGGG |
| | | CACCAGAGGAGCAGA |
| SEQ ID | GI 514825583 NG_033271 Homo sapiens | GCTTTTCATGGTGGC |
| NO: 1091 | Kruppel like factor 10 | AGGTGTCCAGAAGTG |
| | (KLF10), RefSeqGene on chromosome 8 | GGAATGGAGGAAGAT |
| | | GACTGAAATATTCTC |
| SEQ ID | GI 686223163 NG_034261 Homo sapiens | GCCTGTTCCAGTTTT |
| NO: 1092 | primase | AGTACTGGAAGTCCC |
| | (DNA) subunit 2 | ACATCCTTAGAAACC |
| | (PRIM2), RefSeqGene on chromosome 6 | TCTCATTCCTGGACA |
| SEQ ID | GI 343488503 NG_029728 Homo sapiens | CCTTCACACAATCTC |
| NO: 1093 | protein kinase cAMP-activated | CAAGTCACCAACCAT |
| | catalytic subunit beta | GCTAGTTTCAGCATT |
| | (PRKACB), RefSeqGene on chromosom [symbol] | CCTGTTGGTAAAGGA |
| SEQ ID | GI 257153311 NG_012800 Homo sapiens | ATTCCATGCACAAAA |
| NO: 1094 | regulator of G protein signaling 2 | AGAGTGTAGCAGCAG |
| | (RGS2), RefSeqGene on chromosome 1 | GAACACACAACAATT |
| | | CCCTTACTCAGACCT |
| SEQ ID | GI 315365058 HQ384160 Homo sapiens | GAAAACCTTTCTCCC |
| NO: 1095 | fatty acid binding protein 4, adipocyte | TCAACCCCATGCATG |
| | (FABP4) gene, complete cds | ACAGTCCAATAAAGT |
| | | CAGAACTGGGGTTAG |
| SEQ ID | GI 57864635 AY882422 Homo sapiens | ACATCTTGAGTTCCC |
| NO: 1096 | flavin containing monooxygenase 4 | ATACAGGCTCTGCTA |
| | (FM04) gene, complete cds | CTTACTGTATGGTTC |
| | | TGGGCAAGTTGCTTA |
| SEQ ID | GI 14423570 AF387519 Homo sapiens | GAGGGAGAGCAATGT |
| NO: 1097 | interleukin 22 | TGTTCAGAGAAAGAT |
| | (IL22) gene, complete cds | CAACAGGAGGAGAAA |
| | | CTGTCAGAGCTGTCT |
| SEQ ID | GI 27805154 AY217549 Homo sapiens | GGACACCAGTGTATG |
| NO: 1098 | mutL homolog 1, colon cancer, | TTGGGATGCAAACAG |
| | nonpolyposis type 2 | GGAGGCTTATGACAT |
| | (E. coli) | CTAATGTGTTTTCCA |
| | (MLH1) gene, complete cds | |
| SEQ ID | GI 297139781 NG_021374 Homo sapiens | TAGGATTGGTATGTT |
| NO: 1099 | early growth response 1 | TTTCCCCATCTGCAC |
| | (EGR1), RefSeqGene on chromosome 5 | AGCTTTCCAGAAAAG |
| | | GGTCACTGGAGTTTT |
| SEQ ID | GI 908212454 NG_042284 Homo sapiens | CAGAGAAGAGGCTGA |
| NO: 1100 | SMAD family member 1 | ATTAAAAGAAGCTGA |
| | (SMAD1), RefSeqGene on chromosome 4 | AAAGGGGCAAAAGAG |
| | | GCATCCAGAGAAGGT |
| SEQ ID | GI 545687789 NM_015901 Homo sapiens | GAAGCATGGTTTGCT |
| NO: 1101 | nudix hydrolase 13 | CTGGATCTAGGTCTG |
| | (NUDT13), transcript variant 1, mRNA | GATAGCTCCTTTTCC |
| | | ATAAGTGCCTCCTTA |
| SEQ ID | GI 257743127 NG_012865 Homo sapiens | TTCCACGTTCAATGT |
| NO: 1102 | amylo-alpha-1, 6-glucosidase, | TGTCGTGTTGGTAGC |
| | 4-alpha-glucanotransferase | TTAAGATTGCCCATG |
| | (AGL), RefSeqGene on chromoso [symbol] | TCGGGATTATTTCCA |
| SEQ ID | GI 343168757 NG_029673 Homo sapiens | CTTCTGGTTGAGCAC |
| NO: 1103 | Fos proto-oncogene, AP-1 | TTGGTTTGCCTGGAT |
| | transcription factor subunit | GATGCTCTGGCCTTA |
| | (FOS), RefSeqGene on chromosome 1, [symbol] | CTCAATCTTTATCAT |
| SEQ ID | GI 168480137 NG_007294 Homo sapiens | GCACATGAGCAGGAC |
| NO: 1104 | hydroxyacyl-CoA dehydrogenase/ | TGAAAGTATTTGTTC |
| | 3-ketoacyl-CoA | TGTTCCACCTCTGTA |
| | thiolase/enoyl-CoA hydratase | CCTGGCAGAAATGTT |
| | (trifunctiona [symbol] | |
| SEQ ID | GI 432134283 NG_033039 Homo sapiens | AGTTCCCCTTCTCTA |
| NO: 1105 | lymphotoxin beta receptor | TAACCCAAGGGAAGT |
| | (LTBR), RefSeqGene on chromosome 12 | TTCTCTCATTCTGCC |
| | | TTTAGGAGCTGCATT |
| SEQ ID | GI 1154067879 NG_052976 Homo sapiens | GAGCACTATGCTGGC |
| NO: 1106 | malate dehydrogenase 2 | TGTATTTGGGGTACA |
| | (MDH2), RefSeqGene on chromosome 7 | TTTGCCATTTTATGG |
| | | GATCCTTGCAACAAC |
| SEQ ID | GI 215490061 NG_009062 Homo sapiens | TCAAAAAAGCGGCAT |
| NO: 1107 | nuclear receptor subfamily | GGAAATTCATTGGGC |
| | 3 group C member 1 | TCCATTCGATACCTC |
| | (NR3C1), RefSeqGene on chromosome 5 | GTGTTTAGAGATCGT |
| SEQ ID | GI 51479142 NM_001003703 Homo sapiens | ACCTGTTGATGCTAG |
| NO: 1108 | ATP synthase, H+ transporting, | TTCAGAGTATCAGCA |
| | mitochondrial Fo complex subunit F6 | AGAGCTGGAGAGGGA |
| | (ATP5J), transcript v [symbol] | GCTTTTTAAGCTCAA |
| SEQ ID | GI 84043946 NM_030661 Homo sapiens | GTGGCCAAACAAATC |
| NO: 1109 | homeobox A3 | TTCCCCTGGATGAAA |
| | (HOXA3), transcript variant 1, mRNA | GAGTCTCGACAAAAC |
| | | ACAAAGCAGAAAACC |
| SEQ ID | GI 62122910 NM_001014336 Homo sapiens | ATTTCTCAACAGTTT |
| NO: 1110 | interleukin 31 | TCAGAGTGCATGGAC |
| | (IL31), mRNA | CTCGCACTAAAATCA |
| | | TTGACCTCTGGAGCC |
| SEQ ID | GI 208431777 NM_001135638 Homo sapiens | AACCAGAGCGTGATG |
| NO: 1111 | phosphatidylinositol-4-phosphate | TCCTCATGCAAGATT |
| | 5-kinase type 1 alpha | TCTACGTGGTTGAGA |
| | (PIP5K1A), transcript variant 1, [symbol] | GTATCTTCTTTCCCA |
| SEQ ID | GI 149192859 NM_012192 Homo sapiens | TAAAAGTTGCTGACT |
| NO: 1112 | translocase of inner mitochondrial | AGGACCTTACCCACA |
| | membrane 10B | GGGTGGCACTCTGTC |
| | (TIMM10B), mRNA | CTTGGGAAATATAAA |
| SEQ ID | ref\|NG_009824.2\| Homo sapiens | GCCTCAGTTGGAATC |
| NO: 1113 | crystallin alpha B | TTGGTTTACTTGCTT |
| | (CRYAB), RefSeqGene on chromosome | ACCAGCCATGTGACC |
| | | TTAGGCAAGTTAGTT |
| SEQ ID | GI 208022628 NM_004887 Homo sapiens | CCTCCCCTCACCACA |
| NO: 1114 | C-X-C motif chemokine ligand 14 | TTGAGAAATCTCAGT |
| | (CXCL14), mRNA | GAGTCACCGAGTGGT |
| | | TCTGCATATTAATGA |
| SEQ ID | GI 545687789 NM_015901 Homo sapiens | GGAAGCATTAGTTTG |
| NO: 1115 | nudix hydrolase 13 | GATGTAGGCCCTTGT |
| | (NUDT13), transcript variant 1, mRNA | TCAGTCATTTTCTCT |
| | | AAGGCCTTGGAAGCA |
| SEQ ID | GI 1036032346 AH001409 Homo sapiens | AGCAGCCAGGATCAT |
| NO: 1116 | alcohol dehydrogenase 6 | TGGAGTGGATGTCAA |
| | (ADH6) gene, complete cds | CAAGGAGAAATTTAA |
| | | GAAGGCACAGGAATT |
| SEQ ID | GI 117606581 EF064765 Homo sapiens | GAAACAAAGATCTCT |
| NO: 1117 | chemokine | GATAAACATAACAAC |
| | (C-C motif) ligand 21 | ATAGCAGGCTGGGCG |
| | (CCL21) gene, complete cds | CAGTGGCTCATGTCT |
| SEQ ID | GI 21435968 AF518727 Homo sapiens | CTTCTGGATTGGTTA |
| NO: 1118 | cyclin El | ATGGAGGTGAGCTTG |
| | (CCNEl) gene, complete cds | AGTCTTCCTGTTCGC |
| | | TTCATGAAAGCACTG |
| SEQ ID | GI 4572463 AF123653 Homo sapiens | TCAAACGACAGAGGA |
| NO: 1119 | FEZI | GCTTTTCTGGAATTT |
| | (FEZl) gene, complete cds | CAAACCATTGCTCTT |
| | | AGTCCCAAGCTAGGC |
| SEQ ID | GI 291084732 NG_016743 Homo sapiens | ACCTATTTTCCTCGG |
| NO: 1120 | oxidized low density | GCTCATTTAACTGGG |
| | lipoprotein receptor 1 | AAAAGAGCCAAGAGA |
| | (OLR1), RefSeqGene on chromosome 12 | AGTGCTTGTCTTTGG |
| SEQ ID | GI 1026191100 NG_047066 Homo sapiens | TTCTGTCACTGTATA |
| NO: 1121 | proliferating cell nuclear antigen | AGTGATATAAGTGCA |
| | (PCNA), RefSeqGene on chromosome 20 | CCTCTAGCTGGACAG |
| | | CTCCTCAGGTCCTCC |
| SEQ ID | GI 225579099 NG_011677 Homo sapiens | TAAGAAGGGGAGACA |
| NO: 1122 | pyruvate kinase, liver and RBC | GAAGCCATGGAACAT |
| | (PKLR), RefSeqGene on chromosome 1 | AGGAGGAAAATGAGG |
| | | GTGAAAACTAGGAGC |
| SEQ ID | GI 209447082 NG_008731 Homo sapiens | ATTAGAGGTGCTGGA |
| NO: 1123 | vitamin D receptor | CCAAACTGTGCTCTA |
| | (VDR), RefSeqGene on chromosome 12 | CTCCCAGGAAGTGTG |
| | | CAGTCAATATATGAC |
| SEQ ID | GI 38327624 NM_004077 Homo sapiens | CATAGAACTCCGGAA |
| NO: 1124 | citrate synthase | TGACCAGCATGATAT |
| | (CS), mRNA | TTTCAGAGTCTTGTC |
| | | CCCGGGGTATTAGCA |
| SEQ ID | GI 387598072 NM_005277 Homo sapiens | ACATAAATGTGCCAA |
| NO: 1125 | glycoprotein M6A | CAGCTTGATGGTGGC |
| | (GPM6A), transcript variant 1, mRNA | GTTTTTGAAATGTAG |
| | | AACAGAGTGCTTGCA |
| SEQ ID | GI 1168024004 KY497357 Homo sapiens | CATCAGTTCAGAAGC |
| NO: 1126 | HLA-DRA | ATTTCCAGATCCTGG |
| | (HLA-DRA) gene, complete cds | CTCCTTTCAGGTTAG |
| | | GGTCAATTCATTGCA |
| SEQ ID | GI 457232 L26524 Homo sapiens | CGATGCATTTACAGA |
| NO: 1127 | PRKDC gene, complete sequence | GAACATGGCAGGAGA |
| | | GAATCAGCTGCTGGA |
| | | GAGGAGAAGACTTTA |
| SEQ ID | GI 14488407 AF386492 Homo sapiens | TTTCCCAAGCAGGAG |
| NO: 1128 | serine-cysteine proteinase | ACATCAGGATAATGG |
| | inhibitor clade E member 1 | GAACAGAAGACAGGA |
| | (SERPINEl) gene, complete cds | GGTTTATCCCATGAA |
| SEQ ID | GI 205361192 NG_008140 Homo sapiens | TTTCCCGCAGCAACT |
| NO: 1129 | aminoadipate-semialdehyde synthase | TATACCATTTGACTG |
| | (AASS), RefSeqGene on chromosome 7 | CTCCTTGAGCTGTGA |
| | | TAAGAGATGCCTTTG |
| SEQ ID | GI 315013553 NG_027995 Homo sapiens | TCCCCATGCCTCTTT |
| NO: 1130 | cystatin A | GCTGTTTGTGGAAAA |
| | (CSTA), RefSeqGene on chromosome 3 | TAAAGCATTCTATAG |
| | | GCGGAGCTAGTGAAC |
| SEQ ID | GI 678246479 NG_034239 Homo sapiens | CTGAGGAACACAACA |
| NO: 1131 | lipopolysaccharide binding protein | AAATGGTCTACTTTG |
| | (LBP), RefSeqGene on chromosome 20 | CCATCTCGGATTATG |
| | | TCTTCAACACGGCCA |
| SEQ ID | GI 224809324 NG_011504 Homo sapiens | TGGCTTATAAAGAAG |
| NO: 1132 | NAD(P)H quinone dehydrogenase 1 | GCCATCTGAGCCCAG |
| | (NQO1), RefSeqGene on chromosome 16 | ATATTGTGGCTGAAC |
| | | AAAAGAAGCTGGAAG |
| SEQ ID | GI 296010927 NM_172213 Homo sapiens | CTACAACCTCACAGA |
| NO: 1133 | CD8b molecule | AGCTGCTTAACCCAT |
| | (CD8B), transcript variant 2, mRNA | GGATCCTGAAAACAT |
| | | AGGCAAGAAGCACAG |
| SEQ ID | GI 299758475 NM_001190737 Homo sapiens | AACAGCACAGCGGGA |
| NO: 1134 | nuclear factor 1 B | TCCTAGCAGTGCAAG |
| | (NFIB), transcript variant 1, mRNA | TTCAAAAGTAAGTCC |
| | | AATCATTTCTGTGAT |
| SEQ ID | GI 1006833939 NM_003978 Homo sapiens | CACTCCTTCCTCATT |
| NO: 1135 | proline-serine-threonine | TTGCTGCTGATTCTA |
| | phosphatase interacting protein 1 | GCCCCAAACAAAACA |
| | (PSTPIP1), transcript variant 1, | GGTTGAGCTTTTTCC |
| SEQ ID | GI 48762927 NM_002881 Homo sapiens | GCCGAATTCAGGGAA |
| NO: 1136 | RAS like proto-oncogene B | CAGATTCTCCGTGTG |
| | (RALB), mRNA | AAGGCTGAAGAAGAT |
| | | AAAATTCCACTGCTC |
| SEQ ID | GI 190194387 NG_008002 Homo sapiens | CATTGAAGCTGGAAG |
| NO: 1137 | acyl-CoA dehydrogenase, long chain | CCATCATACCTTACT |
| | (ACADL), RefSeqGene on chromosome 2 | GCCTTGAAACCCCTA |
| | | GGACTCAGCTAAGTA |
| SEQ ID | GI 294610641 NG_017089 Homo sapiens | CTTTGGGCCACCATG |
| NO: 1138 | galectin 3 | TTATCTCTCTGAGCC |
| | (LGALS3), RefSeqGene on chromosome 14 | TCAGTTTCCTTATGG |
| SEQ ID | GI 257153325 NG_012807 Homo sapiens | AGGTTGTGGTTTCAC |
| NO: 1139 | ST3 beta-galactoside alpha-2,3- | TTGTGTAATCCTGAG |
| | sialyltransferase 5 (ST3GAL5), | AGCTTGACAGCTTCG |
| | RefSeqGene on chromosome [symbol] | AGGAGTGTCTAACAT |
| SEQ ID | GI 728797213 LN680437 Homo sapiens | CTTGTTGCTGGACTA |
| NO: 1140 | mRNA for CD47 | GTGATCACTGTCATT |
| | | GTCATTGTTGGAGCC |
| | | ATTCTTTTCGTCCCA |
| SEQ ID | GI 226958454 NG_011902 Homo sapiens | TCTTAAGTAGTCACC |
| NO: 1141 | CCHC-type zinc finger nucleic acid | TTTGTAACCCTTGCA |
| | binding protein (CNBP), RefSeqGene | ATGCTGAGCATGAGA |
| | on chromosome 3 | CTGAACACTGGAGGA |
| SEQ ID | GI 224809262 NG_011468 Homo sapiens | ATCTGAGAAATGATG |
| NO: 1142 | matrix metallopeptidase 9 (MMP9), | AGAGATGGGATGAAC |
| | RefSeqGene on chromosome 20 | TGCAGACCATCCATG |
| | | GGTCAAAGAACAGGA |
| SEQ ID | GI 170014708 NG_007458 Homo sapiens | GGCTTGAATTGGTTG |
| NO: 1143 | notch 1 (NOTCH1), RefSeqGene on chromosome 9 | TTTAAAGCTGGGTAA |
| | | ATGCCCCCTTGACAT |
| | | TCTGTTGACACTGTC |
| SEQ ID | GI 226437630 NG_011780 Homo sapiens | CTGTGTCTTTGCTCA |
| NO: 1144 | sphingomyelin phosphodiesterase 1 | TGTTGGCCCTCTGGA |
| | (SMPD1), RefSeqGene on chromosome 11 | AATGATTTCCCCCTT |
| | | TTTTTTAAGTGCTCC |
| SEQ ID | GI 166795249 NM_006845 Homo sapiens | CAATCTTTGAAGGTG |
| NO: 1145 | kinesin family member 2C (KIF2C), | GAAAAGCAACTTGTT |
| | transcript variant 1, mRNA | TTGCATATGGCCAGA |
| | | CAGGAAGTGGCAAGA |
| SEQ ID | GI 193083137 NM_005512 Homo sapiens | GGGAAACTGAGGCTT |
| NO: 1146 | leucine rich repeat containing 32 | AGGAAGAGAATGAAA |
| | (LRRC32), transcript variant 1, mRNA | CTTGTGGAGAGCTTA |
| | | TACAGAGCCTCTGGG |
| SEQ ID | GI 336020352 NM_004834 Homo sapiens | AAGAATATAAAAGGC |
| NO: 1147 | mitogen-activated protein kinase | AACTGCTGGCAGAGA |
| | kinase | GACAGAAGCGGATTG |
| | kinase kinase 4 (MAP4K4), transcript | AGCAGCAGAAAGAAC |
| | variant 1, Mr [symbol] | |
| SEQ ID | GI 2735714 AF004877 Homo sapiens | TGCGTGACTTTGGGC |
| NO: 1148 | pro-alpha 2(1) collagen (COL1A2) | AAGTCAAACGGCCTT |
| | gene, complete cds | TTCTAAAATGTGAGA |
| | | CAGAGATTAAAGGGA |
| SEQ ID | GI 237820664 NG_012051 Homo sapiens | ACTGTCTGTAAAATA |
| NO: 1149 | caveolin 1 (CAV1), RefSeqGene on | ATATTCAGTCTGGCC |
| | chromosome 7 | TCAACCTGTCTTTCC |
| | | AGCCTCGGTGACACA |
| SEQ ID | GI 648216382 NG_029573 Homo sapiens | TTGTTTCTCAAGACC |
| NO: 1150 | TNF receptor superfamily member 8 | AGTTTCCCTGATGGC |
| | (TNFRSF8), RefSeqGene on chromosome 1 | CTTGGCAGTTTTTGA |
| | | GTATTGATCAGGTGT |
| SEQ ID | GI 187761339 NM_130767 Homo sapiens | CTTCCTTACTTTGCT |
| NO: 1151 | acyl-CoA thioesterase 12 (ACOT12), mRNA | GGAAATCTTGGTGGC |
| | | TGGTCAAAATCCATT |
| | | GAAGAAACAGCAGCC |
| SEQ ID | GI 54144649 NM_002090 Homo sapiens | CCCTTACCAGAGCTG |
| NO: 1152 | C-X-C motif chemokine ligand 3 | AAAATGAAAAAGAGA |
| | (CXCL3), mRNA | ACAGCAGCTTTCTAG |
| | | GGACAGCTGGAAAGG |
| SEQ ID | GI 52854078 AY755659 Homo sapiens | ATGAATCCCATTTGC |
| NO: 1153 | small proline-rich protein 1A (SPRRIA) | CTATTGACCCTGCAG |
| | gene, complete cds | TTAGCATGCTGTCAC |
| | | CCTGAATCATAATCG |
| SEQ ID | GI 345478675 NG_029883 Homo sapiens | GGGAAACTCTGCTGT |
| NO: 1154 | death associated protein kinase 1 (DAPK1), | CAACTAAGCAAACTC |
| | RefSeqGene on chromosome 9 | TAAATTTAACATTTG |
| | | GGGGACCCCCTTGGA |
| SEQ ID | GI 982742415 NM_020530 Homo sapiens | CAGGTCACTTTACCT |
| NO: 1155 | oncostatin M (OSM), transcript variant 1, | CTGTGGACCTGTTTT |
| | mRNA | CTCTTTGTGAAGCTA |
| | | GGGAGTTAGAGGCTG |
| SEQ ID | GI 152112977 EU012027 Homo sapiens | GTATTTTAAACCCGG |
| NO: 1156 | high-mobility group box 1 (HMGB1) gene, | CTGGCTGGATCATGT |
| | complete cds | CACTTTCTTATAGAA |
| | | GCCCTGCCTTTCCAG |
| SEQ ID | ref \| NG_033066.2\| Homo sapiens | AAGTGAAGGGAAGGG |
| NO: 1157 | C-C motif chemokine ligand 4 (CCL4), | GAGTTGGGATGGCCT |
| | RefSeqGene | GTAAGATTAGAGTGT |
| | | GGATTTTGAGAAAGA |
| SEQ ID | GI 237858716 NG_012099 Homo sapiens | ATTTAGGCCACTTGG |
| NO: 1158 | macrophage migration inhibitory factor | TGCTCATAACACCTC |
| | (MIF), RefSeqGene on chromosome 22 | TATGTCAGGTGAACA |
| | | CTATTGTCATCCCCA |
| SEQ ID | GI 170014713 NG_007461 Homo sapiens | CAGTTCTTCCTTGGT |
| NO: 1159 | transforming growth factor beta receptor | CATGGCTTACGTAAC |
| | 1 (TGFBR1), RefSeqGene on chromosome 9 | ACAGAGTTCTCTGAA |
| | | CAGATGGACTGTGGT |
| SEQ ID | GI 359338962 NG_031836 Homo sapiens | CGTCCATCGAGACTC |
| NO: 1160 | Z-DNA binding protein 1 (ZBP1), | ATTTGGTCGTAGATG |
| | RefSeqGene on chromosome 20 | ATAGAAAGCTGAGAC |
| | | CTGCTTCAGCACAAA |
| SEQ ID | GI 182995 M68891 Human GATA-binding | TTGTTTGGAGAACAA |
| NO: 1161 | protein (GATA2) mRNA, complete cds | CAAGGACAACTTTAT |
| | | GTAGAGAAAAGGAGG |
| | | GGACGGGACAGACGA |
| SEQ ID | GI 313665837 NM_152230 Homo sapiens | TTCTCAGCCTTCTCT |
| NO: 1162 | inositol polyphosphate multikinase | GAGGGCACTTTGCAA |
| | (IPMK), mRNA | ATACCTGAGTCCAAA |
| | | CAGAAGTACCAACTA |
| SEQ ID | GI 190014585 NM_021144 Homo sapiens | ACTTTCAGACTGCTC |
| NO: 1163 | PC4 and SFRS1 interacting protein 1 | ACAGAAGGAATATGC |
| | (PSIP1), transcript variant 1, mRNA | TGAAAGGCCAACATG |
| | | AGAAAGAAGCAGCAG |
| SEQ ID | GI 209571510 NM_015000 Homo sapiens | TCTTGGCACTGGAAG |
| NO: 1164 | serine/threonine kinase 38 like | GGTAGTTCTGGAAAG |
| | (STK38L), mRNA | CTACTTTGTTGAGAG |
| | | TCTCATTCTTCCCTG |
| SEQ ID | GI 82583661 DQ297144 Homo sapiens | AATGGAAGCAAAGAA |
| NO: 1165 | metallothionein 3 (growth inhibitory | ACAGATGACTGGCTG |
| | factor (neurotrophic)) (MT3) gene, | ATGCTAGAGTTGGGG |
| | complete cds | AACTCTGAGATCTGA |
| SEQ ID | GI 395393980 NG_011966 Homo sapiens | CCACCTCCCAGAGTT |
| NO: 1166 | mitogen-activated protein kinase kinase | CTTAACAGATGTGAA |
| | kinase 7 (MAP3K7), RefSeqGene on | AGTGCCAGGGCACAC |
| | chromosome 6 | AGTAGATACTAATCC |
| SEQ ID | GI 256985178 NG_012796 Homo sapiens | CTTGCCCCTGCTCAA |
| NO: 1167 | glycogen phosphorylase L (PYGL), | TTATCATTGGCTCCT |
| | RefSeqGene on chromosome 14 | CTTGCCTGCCATAGA |
| | | ACTTAAGCAAGTATT |
| SEQ ID | GI 523498473 NM_006332 Homo sapiens | TTTTTCTGATCCAGA |
| NO: 1168 | IFI30, lysosomal thiol reductase | CCCTCGGCACCTGCT |
| | (IFI30), mRNA | ACTTACCAACTGGAA |
| | | AATTTTATGCATCCC |
| SEQ ID | GI 1209857163 NM_015317 Homo sapiens | AATGGTAGTGGTCGA |
| NO: 1169 | pumilio RNA binding family member 2 | TATATCTCTGCAGCA |
| | (PUM2), transcript variant 1, mRNA | CCTGGAGCAGAAGCA |
| | | AAATATCGAAGTGCT |
| SEQ ID | GI 42716353 AY549314 Homo sapiens | TGATTAGTAATGTCT |
| NO: 1170 | tyrosine kinase 2 (TYK2) gene, | GCCACAGGCACAAGA |
| | complete cds | TTGACAAGAGGAGGG |
| | | GTGTATGCTGTGTAT |
| SEQ ID | GI 224809230 NG_011435 Homo sapiens | TGCTGAAACAGGATT |
| NO: 1171 | alcohol dehydrogenase 1B (class 1), | ATGAGAGTGACAGAC |
| | beta polypeptide (ADHIB), RefSeqGene | ACAGGACTGAAGACA |
| | on chromosome | GGGAGAAAATGTGCA |
| SEQ ID | GI 1047225988 NG_051241 Homo sapiens | TATTCTGGGCACCAA |
| NO: 1172 | arrestin domain containing 3 (ARRDC3), | AAGCACATGTAACTG |
| | RefSeqGene on chromosome 5 | CATACTGGCAACAGT |
| | | GAGACAAGCTAACAA |
| SEQ ID | GI 209977039 NG_008841 Homo sapiens | CTATGTCTCTCCTGT |
| NO: 1173 | dopamine receptor D2 (DRD2), | GCTTCTCTTTCATTT |
| | RefSeqGene on chromosome 11 | CCCCCCTGATGTCTT |
| | | GTGAATTCTCCCCTT |
| SEQ ID | GI 942429606 NG_008852 Homo sapiens | AGATTTGAAAGCTAT |
| NO: 1174 | insulin receptor (INSR), | TCTTGCAGGCAGGTG |
| | RefSeqGene on chromosome 19 | GAGAATCTTAAGGAT |
| | | CTCTGACACCCCAGT |
| SEQ ID | GI 256985185 NG_012797 Homo sapiens | AAGACCTAACGCCTA |
| NO: 1175 | membrane bound transcription factor | CTCAGAGTATCTGCC |
| | peptidase, site 2 (MBTPS2), | TGGGAAATGGAGAGA |
| | RefSeqGene on chromosc [symbol] | CCTCAACTTTTAGGA |
| SEQ ID | GI 291084732 NG_016743 Homo sapiens | CCCGGCAACAAGCAG |
| NO: 1176 | oxidized low density lipoprotein | AAGAAGCTTCACAGG |
| | receptor 1 (OLR1), RefSeqGene on | AGTCAGAAAACGAAC |
| | chromosome 12 | TCAAGGAAATGATAG |
| SEQ ID | GI 241896851 NG_012345 Homo sapiens | GGATAATCATCTCTT |
| NO: 1177 | peroxisome proliferator activated | GTATGGGCTGTTTGT |
| | receptor delta (PPARD), RefSeqGene | GCATTGTAGGATGTT |
| | on chromosome 6 | GAGCAGCATCCCTGG |
| SEQ ID | GI 334358873 NG_029029 HOMO SAPIENS | CCAAAAGTACATAAA |
| NO: 1178 | STEROL REGULATORY ELEMENT BINDING | AGACAATGACCATCA |
| | TRANSCRIPTION FACTOR 1 (SREBF1), | CCCAGTGCCGGTGAT |
| | REFSEQGENE ON CHROMOSO [symbol] | GCTAGAAGGAAAGGG |
| SEQ ID | GI 1049017896 NM_002192 Homo sapiens | TGCAGAAACAGTGTG |
| NO: 1179 | inhibin beta A subunit (INHBA), mRNA | AGAAATTAAGTCCTG |
| | | GTTCACTGCGCAGTA |
| | | GCAAAGATGGTCAAG |
| SEQ ID | GI 206597516 NM_001859 Homo sapiens | GGCAGTTGACCCACT |
| NO: 1180 | solute carrier family 31 member 1 | GGAATTTCTATAAGG |
| | (SLC31A1), mRNA | CTGGTACCCTTCCCA |
| | | GAGTTACAGAATCTT |
| SEQ ID | GI 83699688 DQ323999 Homo sapiens | AGTCTGTCTTGAGAT |
| NO: 1181 | TNF receptor-associated factor 4 | CTGATTTTTTCCCCC |
| | (TRAF4) gene, complete cds | TTTACCTAGCTGTGC |
| | | CCCCTCTGGTTATTT |
| SEQ ID | GI 197245396 NG_008399 Homo sapiens | GCCAGATATGGAAGC |
| NO: 1182 | aspartoacylase (ASPA), RefSeqGene | AGAATTGCTGACACT |
| | on chromosome 17 | TTGTTATCCAAACCA |
| | | AGAGGCCTGTCTTCA |
| SEQ ID | GI 307611940 NG_027759 Homo sapiens | CAGGCAATAAAATGC |
| NO: 1183 | caspase recruitment domain family | CAGCCAGGACACTGA |
| | member 11 (CARD11), RefSeqGene | AGAACACAGCAATGA |
| | on chromosome 7 | AACAAATTCCATCCA |
| SEQ ID | GI 323510659 NG_028143 Homo sapiens | AAAAAATCTGAAACT |
| NO: 1184 | interleukin 18 (IL18), RefSeqGene | GGTCAAGAAAGAACA |
| | on chromosome 11 | AGGAAGACTTGCCAA |
| | | AGCAAGGCCGGTGTG |
| SEQ ID | GI 237858755 NG_012119 Homo sapiens | ATGACAGAAAGAACT |
| NO: 1185 | protein tyrosine phosphatase, | CCAGAAATCTGCAAA |
| | non-receptor type 1 (PTPN1), | GGGATCACCTTGAGT |
| | RefSeqGene on chromosome 2 [symbol] | CTGGCTGGATACAGT |
| SEQ ID | GI 55742773 NM_001007033 Homo sapiens | ACAAGAGTTGAAAGA |
| NO: 1186 | C-type lectin domain containing | CATGTTTTCTAGATG |
| | 6A (CLEC6A), transcript variant 1, | GCTCACTCACATGGC |
| | mRNA | TGGCAACTTGGTGTT |
| SEQ ID | GI 1216866445 NM_005302 Homo sapiens | CTGTTGCTGTGAGGA |
| NO: 1187 | G protein-coupled receptor 37 (GPR37), | ATGCATTCAGAAGTC |
| | mRNA | TTCAACGGTGACCAG |
| | | TGATGACAATGACAA |
| SEQ ID | GI 153082754 NM_001547 Homo sapiens | GACAACCAGTACCTT |
| NO: 1188 | interferon induced protein with | AAAGTCCTCCTGGCT |
| | tetratricopeptide repeats 2 (IFIT2), | CTGAAGCTTCATAAG |
| | mRNA | ATGCGTGAAGAAGGT |
| SEQ ID | GI 12584865 AF307860 Homo sapiens | AGTCAGAGGGCAGAC |
| NO: 1189 | CYR61 protein (CYR61) gene, complete cds | CCTGTGAATATAACT |
| | | CCAGAATCTACCAAA |
| | | ACGGGGAAAGTTTCC |
| SEQ ID | GI 1121393451 NG_012066 Homo sapiens | GCATAGGTACCCATT |
| NO: 1190 | Fc fragment of IgG receptor IIa | AAGCCCATTGTGTTC |
| | (FCGR2A), RefSeqGene on chromosome 1 | ACTGGTTTCTTCCTG |
| | | CATTTGTGAGTCACT |
| SEQ ID | GI 1032528811 NG_050748 Homo sapiens | GGGGCAACGTTCACA |
| NO: 1191 | solute carrier family 4 member 3 | ATATTTATCAGCCTG |
| | (SLC4A3), RefSeqGene on chromosome 2 | TAAGGTGTAGCTGAT |
| | | CCAATTGGAATGGCT |
| SEQ ID | GI 156142193 NM_005880 Homo sapiens | TTTTCTCTCACATTT |
| NO: 1192 | DnaJ heat shock protein family | TTGGTGGGGGATTGT |
| | (Hsp40) member A2 (DNAJA2), mRNA | TCGGCTTCATGGGCA |
| | | ATCAGAGTAGAAGTC |
| SEQ ID | GI 541862110 NM_017434 Homo sapiens | CACCCAAGGTTTTAA |
| NO: 1193 | dual oxidase 1 (DUOX1), transcript | GCACGTTCTTTCATC |
| | variant 1, mRNA | AGACCCTGGCCCAAT |
| | | ACCTATGTATGCAAT |
| SEQ ID | GI 372466583 NM_005239 Homo sapiens | AACCATCTTAATAGC |
| NO: 1194 | ETS proto-oncogene 2, transcription | ATGCTGCTCCTTTTT |
| | factor (ETS2), transcript | GCTCAGTGTCCACAG |
| | variant 1, mRNA | CAAGATGACGTGATT |
| SEQ ID | GI 4755084 AFO17178 Homo sapiens | CAGAACACTATAGGT |
| NO: 1195 | pro alpha 1(1) collagen (COL1A1) | CACCTCCTTGCCCCA |
| | gene, complete cds | CACTGGAAATCTCAA |
| | | GCTTATCCATGTCTT |
| SEQ ID | GI 321267517 NG_028118 Homo sapiens | CAGTGCTGACCAATC |
| NO: 1196 | arrestin beta 1 (ARRB1), RefSeqGene | AAATTCCTCTACTGG |
| | on chromosome 11 | GAATTTGGAAGTGGG |
| | | CCATTCAACCAGTTA |
| SEQ ID | GI 315360647 NG_028023 Homo sapiens | TCTCTTAACCTTTAC |
| NO: 1197 | conserved helix-loop-helix ubiquitous | CTCATACAAGACCAG |
| | kinase (CHUK), RefSeqGene on | CTTGTCACTGCTCCT |
| | chromosome 10 | TATGCCTCAAACCCG |
| SEQ ID | GI 38327038 NM_002154 Homo sapiens | TTCAAAGCCCAAACC |
| NO: 1198 | heat shock protein family A | CAAAGTGGAACCTCC |
| | (Hsp70) member 4 (HSPA4), mRNA | AAAAGAGGAACAAAA |
| | | AAATGCAGAGCAGAA |
| SEQ ID | GI 156523967 NM_001618 Homo sapiens | AGTTGCCCTTGGAAA |
| NO: 1199 | poly(ADP-ribose) polymerase 1 | CATGTATGAACTGAA |
| | (PARP1), mRNA | GCACGCTTCACATAT |
| | | CAGCAAGTTACCCAA |
| SEQ ID | GI 1060099004 NM_001330400 Homo sapiens | CATGTCTGGGTCGTC |
| NO: 1200 | sideroflexin 5 (SFXN5), transcript | TTTTGAAAAGCTCAC |
| | variant 1, mRNA | TTCAAGCTCACCCTG |
| | | CTCCTACCTATCATA |
| SEQ ID | GI 338221701 NG_029188 Homo sapiens | ACATCTCCTCCTACT |
| NO: 1201 | caspase 9 (CASP9), RefSeqGene on | GTATATTTATTCTTG |
| | chromosome 1 | TGGGGAATGAGTCCT |
| | | GCCCTACGGGGAGTT |
| SEQ ID | GI 193211405 NG_008118 Homo sapiens | ACCTTGAGTAAATGG |
| NO: 1202 | left-right determination factor 2 | CTTTAAAATCCTCTC |
| | (LEFTY2), RefSeqGene on chromosome 1 | TCCACCATGTGCTCA |
| | | TCTGGAACAGGGGTA |
| SEQ ID | GI 294489300 NG_017057 Homo sapiens | TCATCTACTCCCAAG |
| NO: 1203 | solute carrier family 27 member 4 | AACAGGAAAACTCGG |
| | (SLC27A4), RefSeqGene on chromosome 9 | AGAAAAACAGTCCCA |
| | | TCAGATGTCCCCTTG |
| SEQ ID | GI 81230486 NM_001037162 Homo sapiens | CTTCTTTCTTGAAGG |
| NO: 1204 | acyl-CoA thioesterase 6 (ACOT6), mRNA | GCATCACAGCCACTG |
| | | TACTTATCAATGCCT |
| | | GTGTAGCCAACACAG |
| SEQ ID | GI 31563435 NM_144673 Homo sapiens | AGATCAAGATTCGGA |
| NO: 1205 | CKLF like MARVEL transmembrane domain | GTTTGGGCTGCCTAA |
| | containing 2 (CMTM2), transcript | TAGCTGCAATGATAC |
| | variant 1, mRNA | TGTTGTCCTCACTCA |
| SEQ ID | GI 260763875 NM_182569 Homo sapiens | AATCAAAGACTATTG |
| NO: 1206 | glycerophosphodiester phosphodiesterase | GATACATTTGGCATT |
| | domain containing 1 (GDPD1), | GGGCTGAGTGTGGTG |
| | transcript variant | GCTCATGCCTGTAAT |
| SEQ ID | GI 94557300 NM_006251 Homo sapiens | AATTATAACCGAGGG |
| NO: 1207 | protein kinase AMP-activated catalytic | CTGGCGTTTTGGAAT |
| | subunit alpha 1 (PRKAA1), transcript | GCAATTTGCACAGGG |
| | variant 1, mRNA | ATTGGAACATGATTT |
| SEQ ID | GI 109809760 NM_014445 Homo sapiens | TCAACTGACCTTGGG |
| NO: 1208 | stress associated endoplasmic | CCAGCAGGTTTTTAA |
| | reticulum protein 1 (SERP1), mRNA | CTAAATTGTTACTTG |
| | | CCTTTCTCACCCAGT |
| SEQ ID | GI 335057570 NG_029067 Homo sapiens | TTCCCACATTGGCCT |
| NO: 1209 | fibroblast growth factor 2 (FGF2), | ACTTGCTACCCCTCA |
| | RefSeqGene on chromosome 4 | AATACTCTGGATATG |
| | | ATCCTGTTGTAAGGC |
| SEQ ID | GI 1147544507 NG_028250 Homo sapiens | GTCTCTGTAATACAG |
| NO: 1210 | PPARG coactivator 1 alpha | TGTCCCAGAGGATGC |
| | (PPARGCIA), RefSeqGene on | TCCACAGTGCCGATA |
| | chromosome 4 | AACTTGGGTTAAGTG |
| SEQ ID | GI 22122007 AY135686 Homo sapiens | CTGCTTTCTGTGGAA |
| NO: 1211 | growth arrest and DNA-damage- | AAGATTCTAACTTGG |
| | inducible, alpha (GADD45A) gene, | TTCCCTGCCATCCCT |
| | complete cds | GAATACAAACGGGTT |
| SEQ ID | GI 1015539575 AH009651 Homo sapiens | CTGAAGCCCAGAATA |
| NO: 1212 | xeroderma pigmentosum group C | GCTACATGATGCCTC |
| | protein (XPC) gene, complete cds | TAAGGTCTTTTCCTT |
| | | GGTGAGCCTGAGAAT |
| SEQ ID | GI 255652911 NG_012637 Homo sapiens | GGAGAAACCCTTGAA |
| NO: 1213 | C-C motif chemokine receptor 5 | AAGACATCAAGCACA |
| | (gene/pseudogene) (CCR5), | GAAGGAGGAGGAGGA |
| | RefSeqGene on chromosome 3 | GGTTTAGGTCAAGAA |
| SEQ ID | GI 255652919 NG_012643 Homo sapiens | AGGCGGTTTGCACAA |
| NO: 1214 | carnitine palmitoyltransferase | CCCTCTAGTGCGTCG |
| | 1B (CPT1B), RefSeqGene on | TTTCCTCTTCTGTGA |
| | chromosome 22 | AATACTTTATAGGAT |
| SEQ ID | GI 388490119 NG_032755 Homo sapiens | TCCCGATTTGACAAA |
| NO: 1215 | interferon induced transmembrane | TGCCAGGAAAAGGAA |
| | protein 3 (IFITM3), RefSeqGene | ACTGTTGAGAAACCG |
| | on chromosome 11 | AAACTACTGGGGAAA |
| SEQ ID | GI 224809277 NG_011481 Homo sapiens | ATCTTTAAAGGCCAT |
| NO: 1216 | interleukin 18 receptor accessory | TGCTGATCCTGCCTT |
| | protein (IL18RAP), RefSeqGene on | GTTCCTTGGTTGCAG |
| | chromosome 2 | TCCTTGTAAGAAGAG |
| SEQ ID | GI 358679296 NG_031810 Homo sapiens | CAATTCCTACTCTGC |
| NO: 1217 | interferon regulatory factor 3 | TATTGGAAAAACAGG |
| | (IRF3), RefSeqGene on chromosome 19 | GGAGCAGGGAAGAGA |
| | | AAGCATTTTCCCCAG |
| SEQ ID | GI 1027250680 NG_047105 Homo sapiens | TATGAATGGGAAAGG |
| NO: 1218 | slit guidance ligand 2 (SLIT2), | AGAAGGTGGCATAAG |
| | RefSeqGene on chromosome 4 | TTCAGACCCAGAGTG |
| | | TGCTACAGTTCTTGG |
| SEQ ID | GI 341865593 NG_029549 Homo sapiens | CCCCTGAGATAGGTG |
| NO: 1219 | TGF-beta activated kinase 1 (MAP3K7) | CTACTGTTATTCCTA |
| | binding protein 1 (TAB1), RefSeqGene | TTTGACAGACTGAGA |
| | on chromosorr | CACTGAGGTGGTCGT |
| SEQ ID | GI 1043261406 NG_051107 Homo sapiens | TGTGATGGGCACACA |
| NO: 1220 | vacuole membrane protein 1 (VMP1), | CACAAACACACACAC |
| | RefSeqGene on chromosome 17 | AGTGCCTTAGCCATG |
| | | AGTAATATAAGCAAA |
| SEQ ID | GI 974005372 NM_005944 Homo sapiens | ATCTAGTCCAGTTCC |
| NO: 1221 | CD200 molecule (CD200), transcript | TGCTTACTGCTTTGC |
| | variant 1, mRNA | TAATAGCTGGCCTTG |
| | | CTAGAATCCTTGGTT |
| SEQ ID | GI 523425747 NM_004599 Homo sapiens | GTCAATCATAAACTG |
| NO: 1222 | sterol regulatory element binding | CGCCAGGAGAACATG |
| | transcription factor 2 (SREBF2), | GTGCTGAAGCTGGCA |
| | transcript variant 1, mRN [symbol] | AATCAAAAGAACAAG |
| SEQ ID | GI 24371240 NM_024630 Homo sapiens | CGTCATTCTTCGTTC |
| NO: 1223 | zinc finger DHHC-type containing | ACAGCAAACAGGATT |
| | 14 (ZDHHC14), transcript variant | CCTAAATGCCCTTAA |
| | 1, mRNA | GGACAGTCCTGCAAG |
| SEQ ID | GI 326535636 GU997628 Homo sapiens | GGCTGATTCAGATGC |
| NO: 1224 | annexin A1 (ANXAl) gene, complete cds | CAGGGTAAGGAAGTG |
| | | CTTACAAAATACTGC |
| | | TGCAGTTCATCTTCC |
| SEQ ID | GI 52352731 AY751746 Homo sapiens | ATTTCTGGCAGACAT |
| NO: 1225 | jun B proto-oncogene (JUNB) gene, | GTCTCCATCTTCTAC |
| | complete cds | CTGGCATATTTTACC |
| | | TGCCTCAGTGTACCC |
| SEQ ID | GI 221554534 NG_009447 Homo sapiens | CATGTCCCATGTGTC |
| NO: 1226 | dual oxidase 2 (DUOX2), RefSeqGene | TACCCAGATGCCAGA |
| | on chromosome 15 | GTAGGGATGTCAAGA |
| | | TACATGCAGTCATTC |
| SEQ ID | GI 270309111 NG_016167 Homo sapiens | AGAGGGTTTTTCTGT |
| NO: 1227 | glycogen synthase 2 (GYS2), | TGACAGCTCTGGATT |
| | RefSeqGene on chromosome 12 | GTTTGGGTAGATACT |
| | | GACAGGGCAGATACC |
| SEQ ID | GI 618857519 NG_034119 Homo sapiens | AGTGTGCCAATTGGG |
| NO: 1228 | nuclear receptor subfamily 2 | ACCAGTATCAAAAGA |
| | group F member 1 (NR2F1), | GAGCCTTGAAGAAAG |
| | RefSeqGene on chromosome 5 | AAAGAAAGGGCTTCC |
| SEQ ID | GI 237858740 NG_012111 Homo sapiens | TTGTACCTAAGTCAG |
| NO: 1229 | platelet derived growth factor | AGTTCATATGGGTCC |
| | subunit B (PDGFB), RefSeqGene | ATCACTTTTTAGCTG |
| | on chromosome 22 | GCAGAGCAGGTTCCC |
| SEQ ID | GI 189339276 NM_001204 Homo sapiens | GGACAGTACTATCTG |
| NO: 1230 | bone morphogenetic protein | GCCAAACAACCAACA |
| | receptor type 2 (BMPR2), mRNA | TAGTGACACATAGGG |
| | | CCCAAGAAATGTTGC |
| SEQ ID | GI 63054827 NM_001915 Homo sapiens | ATGACTAAGGAGCTG |
| NO: 1231 | cytochrome b561 (CYB561), | AAGAAGGCCCCCAGA |
| | transcript variant 1, mRNA | AGCGGATTTGTGGTG |
| | | GGTTATTTTATTTTG |
| SEQ ID | GI 899148489 NM_001135690 Homo sapiens | TCCTGGCTTGCGTAA |
| NO: 1232 | proenkephalin (PENK), mRNA | TGGAATGTGAAGGTA |
| | | AACTGCCTTCTCTGA |
| | | AAATTTGGGAAACCT |
| SEQ ID | GI 82583657 DQ297142 Homo sapiens | TCCAGTTCACTGACA |
| NO: 1233 | peroxiredoxin 1 (PRDX1) gene, | AACATGGGGAAGGTA |
| | complete cds | AGCCATCTGTCTGAT |
| | | AACAGGACAACAGAG |
| SEQ ID | GI 209977039 NG_008841 Homo sapiens | CACATAACAGAATGG |
| NO: 1234 | dopamine receptor D2 (DRD2), | GTTGATTCCATGTTA |
| | RefSeqGene on chromosome 11 | TGGTCTGCCCATAAG |
| | | TTGGGGCTTATGGCA |
| SEQ ID | GI 268370133 NG_015859 Homo sapiens | GTCTTAAGTTTGAGG |
| NO: 1235 | GATA binding protein 3 (GATA3), | GATCTGAGATTTCCC |
| | RefSeqGene on chromosome 10 | AGATTCCCGGCTGCA |
| | | CAGAATTTTCTTGCG |
| SEQ ID | GI 211064491 NG_008915 Homo sapiens | TCCTTCTCAAGCTAA |
| NO: 1236 | heat shock protein family D (Hsp60) | GAAAGGAAAACGGAA |
| | member 1 (HSPD1), RefSeqGene on | TTTCCCAATTCCTCT |
| | chromosome 2 | GGCTGCAGCTTTCAG |
| SEQ ID | GI 345525588 NG_029933 Homo sapiens | CAAAAGCTCATCCAT |
| NO: 1237 | interleukin 16 (IL16), RefSeqGene | TTGCGTTCCATGATG |
| | on chromosome 15 | CTGGGATTTACACTT |
| | | GAGGCTTAGCTTTGC |
| SEQ ID | GI 224809271 NG_011477 Homo sapiens | ATATCAGACACTTTC |
| NO: 1238 | TNF superfamily member 4 (TNFSF4), | CACCTTTGTTTTTGG |
| | RefSeqGene on chromosome 1 | ACAGCCCAGTGCTAA |
| | | AAGCACTGAAGGAGG |
| SEQ ID | GI 442092991JQ924061 Homo sapiens | GGATGGGATTGCAAA |
| NO: 1239 | ATG5 (ATG5) mRNA, complete cds | ATGACAGATTTGACC |
| | | AGTTTTGGGCCATCA |
| | | ATCGGAAACTCATGG |
| SEQ ID | GI 41393574 NM_033214 Homo sapiens | CACAGATCCAGGCCA |
| NO: 1240 | glycerol kinase 2 (GK2), mRNA | CAGAAAGTGAAATTC |
| | | GTTATGCCACATGGA |
| | | AGAAAGCCGTAATGA |
| SEQ ID | GI 440502998 JX512445 Homo sapiens | ATTGGCATTCTTTGT |
| NO: 1241 | integrin, alpha V (ITGAV) gene, | CTTGTGGTTCCTTCC |
| | complete cds | CTTATCTTCAAAGCC |
| | | AGCAATAGCTACCGG |
| SEQ ID | GI 226509596 NG_011798 Homo sapiens | GAAACCTTGGATGGA |
| NO: 1242 | ATP binding cassette subfamily C | CCAGAGGGAATACCT |
| | member 2 (ABCC2), RefSeqGene on | GGGTTCTGAAAAACT |
| | chromosome 10 | GAGCATAGTCACTGA |
| SEQ ID | GI 298104098 NG_021428 Homo sapiens | AAAATGAGAATCTGG |
| NO: 1243 | C-C motif chemokine receptor 2 | TTTGCTGGGGAAGAT |
| | (CCR2), RefSeqGene on chromosome 3 | AAAGGGTGTCGGAAA |
| | | ATGGCTGTTGGGTAA |
| SEQ ID | GI 1068937316 NG_051332 Homo sapiens | GCCAGGATTTGAACC |
| NO: 1244 | pyruvate dehyrogenase phosphatase | AAGTCCAAAGTCCCA |
| | catalytic subunit 2 (PDP2), | ATACTGGGCTTTCAG |
| | RefSeqGene on chromoso [symbol] | GAAGGGAGAATTATG |
| SEQ ID | GI 215598755 NG_009072 Homo sapiens | GCCTGTTAGGGCTGG |
| NO: 1245 | von Willebrand factor (VWF), | AACAGATCTTTATTT |
| | RefSeqGene on chromosome 12 | GTCTGGAATGCTTAA |
| | | GACCTCTCTTCCCCT |
| SEQ ID | GI 90577165 NM_032587 Homo sapiens | ATGCCAATTCAAGAG |
| NO: 1246 | caspase recruitment domain family | CCTGGGACTCAATGT |
| | member 6 (CARD6), mRNA | GAGCTCAGCCAGAAT |
| | | CTTCAGAATCTCTAT |
| SEQ ID | GI 387763637 NM_001098272 Homo sapiens | GATGAAGGAGTAGGA |
| NO: 1247 | 3-hydroxy-3-methylglutaryl-CoA | CTTGTGCATTCAAAC |
| | synthase 1 (HMGCS1), transcript | ATAGCAACTGAGCAT |
| | variant 1, mRNA | ATTCCAAGCCCTGCC |
| SEQ ID | GI 117606677 EF078888 Homo sapiens | TCAGCAGTGCTGAGG |
| NO: 1248 | Kruppel-like factor 2 | TTGAGACATCGCCTC |
| | (lung) (KLF2) gene, complete cds | TGGTTCCTAAAAGAT |
| | | CATTGCTCTTATCAG |
| SEQ ID | GI 3041866 U94788 Human p53 | GTTTGTTTCTTTGCT |
| NO: 1249 | (TP53) gene, complete cds | GCCGTGTTCCAGTTG |
| | | CTTTATCTGTTCACT |
| | | TGTGCCCTGACTTTC |
| SEQ ID | GI 190358485 NG_008035 Homo sapiens | TTTCATCATAGTCAG |
| NO: 1250 | carnitine palmitoyltransferase 2 | TCCAGTCCTGGGAAA |
| | (CPT2), RefSeqGene on chromosome 1 | CAAAATGGCATTGTT |
| | | AGCCTCACAACGCAG |
| SEQ ID | GI 344925888 NG_029692 Homo sapiens | ATACCTCAAGAATGA |
| NO: 1251 | 2′-5′-oligoadenylate synthetase 2 | ACGCCGAGGAAACTT |
| | (OAS2), RefSeqGene on chromosome 12 | CCCCCAGTAAAAACA |
| | | TCACCATTGCTTTCC |
| SEQ ID | GI 209447076 NG_008726 Homo sapiens | AAGTTTGTGGCTAGG |
| NO: 1252 | paraoxonase 3 (PON3), RefSeqGene | GACATGCCAATCCCT |
| | on chromosome 7 | TCTCCAGATGTGCTG |
| | | ACTTAAGGAGAATAA |
| SEQ ID | GI 597709817 NM_032965 Homo sapiens | GGATTCACCACTGCT |
| NO: 1253 | C-C motif chemokine ligand 15 | AACACCTCCTGGTTG |
| | (CCL15), mRNA | GAACTACAGGAATAG |
| | | AACTGGAAAGGGAAA |
| SEQ ID | GI 109637772 NM_015247 Homo sapiens | GCAAAGAAACTGAAG |
| NO: 1254 | CYLD lysine 63 deubiquitinase | GCAGAGTCCTAACGT |
| | (CYLD), transcript variant 1, mRNA | TGCATCTTATTCGAG |
| | | CTGGCAGTTCTGTTC |
| SEQ ID | GI 257743477 NM_181657 Homo sapiens | GAAGAGGAGATCCCC |
| NO: 1255 | leukotriene B4 receptor (LTB4R), | AAGCTGTCTACAGAT |
| | transcript variant 1, mRNA | CCTTACTGGAAGGTA |
| | | TGGTGCACCAATTTG |
| SEQ ID | GI 68160936 NM_005082 Homo sapiens | GTGATTCAGGGTCAT |
| NO: 1256 | tripartite motif containing 25 | GGTGACCCTGATCCA |
| | (TRIM25), mRNA | GTTTGGGTGGAAATC |
| | | CTTCCTAAGTATCAT |
| SEQ ID | GI 51537346 AY728138 Homo sapiens | GAAAGTGCAGAGTAG |
| NO: 1257 | chemokine (C-X-C motif) receptor 4 | ATGAGAACCTTTAAC |
| | (CXCR4) gene, complete cds | CACCAACATTAGGGA |
| | | GGGGTCCCAGACAAA |
| SEQ ID | GI 343098512 NG_029658 Homo sapiens | TGATTGGCATAAATG |
| NO: 1258 | BTB domain and CNC homolog 1 | GATCGTGATTCATCT |
| | (BACH1), RefSeqGene on chromosome 21 | TAGGTTGTGGCTGGG |
| | | GTCTACTTCCTTGGA |
| SEQ ID | GI 906847382 NG_042271 Homo sapiens | TTCTGATTGGTCCAT |
| NO: 1259 | calcium voltage-gated channel subunit | ATAGCTGAGCTCTGA |
| | alphal B (CACNA1B), RefSeqGene on | TTGGCTGAGGCAAGT |
| | chromosome 9 | GAACTCTGATTGGTT |
| SEQ ID | GI 994323652 NG_032159 Homo sapiens | GACAGGGTCGCTAGA |
| NO: 1260 | CASP2 and RIPK1 domain containing | CTCGGCTGGAATTAT |
| | adaptor with death domain (CRADD), | ATGTTTCTGTTCATC |
| | RefSeqGene on cl | ACATGGAAGGCTTGA |
| SEQ ID | GI 966209932 NG_033919 Homo sapiens | GCCTAAGTTGTTTCC |
| NO: 1261 | dedicator of cytokinesis 1 (DOCK1), | AAGGTAGCAAGGTTT |
| | RefSeqGene on chromosome 10 | TCCCATACTTTGAGC |
| | | CCCTCCCCATTTATC |
| SEQ ID | GI 324021728 NG_028155 Homo sapiens | GTGACTAAGTACATC |
| NO: 1262 | indoleamine 2,3-dioxygenase 1 (IDO1), | CTGATTCCTGCAAGC |
| | RefSeqGene on chromosome 8 | CAGCAGCCAAAGGAG |
| | | AATAAGACCTCTGAA |
| SEQ ID | GI 224809341 NG_011508 Homo sapiens | TGATTCTGAGCCCCT |
| NO: 1263 | insulin like growth factor binding | GAGGCAAAACGCTTT |
| | protein 3 (IGFBP3), RefSeqGene on | GCAGGTAATAATTCA |
| | chromosome 7 | GTTTTCCCATCTGAG |
| SEQ ID | GI 300116282 NG_023271 Homo sapiens | ATCACGGACATTACT |
| NO: 1264 | regenerating family member 1 alpha | CTGCTGTCCTTTTTC |
| | (REGIA), RefSeqGene on chromosome 2 | TGACCCGTCCTCTTG |
| | | GAGGACTCAGTATAT |
| SEQ ID | GI 597709817 NM_032965 Homo sapiens | ATAATAATAAAGAGA |
| NO: 1265 | C-C motif chemokine ligand 15 (CCL15), | CAAAAGAGGCCAGCC |
| | mRNA | ACCCACCTCCAACAC |
| | | CTCCTGTGAGTTTCT |
| SEQ ID | GI 55742773 NM_001007033 Homo sapiens | ACCTAGGTGAGCCCA |
| NO: 1266 | C-type lectin domain containing 6A | ATCATTCTGCAGAGC |
| | (CLEC6A), transcript variant 1, mRNA | AATGTGCTTCAATAG |
| | | TCTTCTGGAAACCTA |
| SEQ ID | GI 1049010878 AH003215 Homo sapiens | CCTTTCGGCGAGATA |
| NO: 1267 | CD8 antigen (CD8A) gene, complete cds, | CGTCTAACCCTGTGC |
| | alternatively spliced | AACAGCCACTACATT |
| | | ACTTCAAACTGAGAT |
| SEQ ID | GI 12584865 AF307860 Homo sapiens | TCAGAGACACACTCC |
| NO: 1268 | CYR61 protein (CYR61) gene, complete | TCTTCCCCGTTCTAC |
| | cds | TCTTTCAACAGATAA |
| | | CTTGCCTCTCACCTT |
| SEQ ID | GI 32815083 AY340073 Homo sapiens | CAGGAGGGGACGTAG |
| NO: 1269 | glutamate decarboxylase 2 (pancreatic | TATAGGGAGCAGGAA |
| | islets and brain, 65 kDa) (GAD2) | GTAAATAAAGCACCA |
| | gene, complete cds | GCAACTCAACAACTG |
| SEQ ID | GI 166706816 EU332867 Homo sapiens | CCCTGGGAAATGCAT |
| NO: 1270 | protein kinase C, epsilon (PRKCE) | ATGAATGAGTTGTGT |
| | gene, complete cds | GGTTGAGGAAGGAGA |
| | | GGCAAAGTCAATGTT |
| SEQ ID | GI 365777421 NG_031966 Homo sapiens | ACCAGCACTCCAGGA |
| NO: 1271 | interleukin 21 (IL21), RefSeqGene on | AAGGCAATGCATTGG |
| | chromosome 4 | AATAAACAAGATGAA |
| | | GCAGTGAGACTTGAA |
| SEQ ID | GI 212549771 NG_008990 Homo sapiens | TGATGAGAAGCAGTT |
| NO: 1272 | TNF superfamily member 11 (TNFSF11), | GTAACTCTTGGTCCT |
| | RefSeqGene on chromosome 13 | TTGCTGTCATCTGTG |
| | | GTGAAGTAGGCAGAG |
| SEQ ID | GI 209862753 NM_004343 Homo sapiens | AAATGAAGGACAAAC |
| NO: 1273 | calreticulin (CALR), mRNA | AGGACGAGGAGCAGA |
| | | GGCTTAAGGAGGAGG |
| | | AAGAAGACAAGAAAC |
| SEQ ID | GI 166706902 NM_002053 Homo sapiens | CTCATTGAGAACACT |
| NO: 1274 | guanylate binding protein 1 (GBP1), | AATGGGCGACTGATG |
| | mRNA | GCGAATCCAGAAGCT |
| | | CTGAAGATCCTTTCT |
| SEQ ID | GI 387598072 NM_005277 Homo sapiens | AGAGCTTCATGACAT |
| NO: 1275 | glycoprotein M6A (GPM6A), transcript | CCACTCTACTCGCTC |
| | variant 1, mRNA | CAAAGAGCGGCTCAA |
| | | TGCATACACATAAAT |
| SEQ ID | GI 20530138 AF261937 Homo sapiens | AAGTGAATCAGTGAA |
| NO: 1276 | NFKBIE protein (NFKBIE) gene, | GTTGGCCAGATATGA |
| | complete cds | GACCATGGTGTGGTG |
| | | AGGCCTATAAGAACC |
| SEQ ID | GI 260593639 NG_013007 Homo sapiens | GCCCCTGAACTTTCA |
| NO: 1277 | C-reactive protein (CRP), | GCCGAATACATCTTT |
| | RefSeqGene on chromosome 1 | TCCAAAGGAGTGAAT |
| | | TCAGGCCCTTGTATC |
| SEQ ID | GI 1121393451 NG_012066 Homo sapiens | CGGAAATCCGAACGC |
| NO: 1278 | Fc fragment of IgG receptor Iia | CAGCAGATCTGAATG |
| | (FCGR2A), RefSeqGene on chromosome 1 | GAATGTTCTGGATTG |
| | | AAGAAAGTGGGAAAT |
| SEQ ID | GI 1068937310 NG_008847 Homo sapiens | GTGGAGTTTCGGGCT |
| NO: 1279 | glucokinase (GCK), RefSeqGene on | GGACGGTGATTGGCT |
| | chromosome 7 | GAAACGAAGAAGTGT |
| | | TTAGAAAATCTCTTG |
| SEQ ID | GI 342837710 NG_029639 Homo sapiens | TTCTCACAGTGATCA |
| NO: 1280 | inhibitor of DNA binding 1, HLH | TTGGGCCATCTAGAT |
| | protein (ID1), RefSeqGene on | CACCTGGGGAGGTTG |
| | chromosome 20 | TTAAAATGCAGATGA |
| SEQ ID | GI 263191773 NG_015830 Homo sapiens | GAACTGGGTGAAGAA |
| NO: 1281 | insulin receptor substrate 1 (IRS1), | TGTGTCTCAAGATGG |
| | RefSeqGene on chromosome 2 | AAAAATGAATGGCTG |
| | | GTGCTTTAGCCTCCA |
| SEQ ID | GI 1028630729 NG_050573 Homo sapiens | AACTAGTACTGATGG |
| NO: 1282 | NLR family pyrin domain containing 6 | TGAAACAGGTCCATC |
| | (NLRP6), RefSeqGene on chromosome 11 | CTACGTTGATGGCAA |
| | | CTCGGCAAATTAGCT |
| SEQ ID | GI 31317227 NM_004430 Homo sapiens | AAAGGCAGGCTTCAA |
| NO: 1283 | early growth response 3 (EGR3), | CCAGCCACTCCAGCT |
| | transcript variant 1, mRNA | TTGTGTCTTCTCTCA |
| | | ATTACATAGCAATTT |
| SEQ ID | GI 32479526 NM_000218 Homo sapiens | GACGGTTCCTACACA |
| NO: 1284 | potassium voltage-gated channel | GGACAGGGGTTCCTT |
| | subfamily Q member 1 (KCNQ1), | CTGGGCATTACATCG |
| | transcript variant 1, Mrn [symbol] | CATAGAAATCAATAA |
| SEQ ID | GI 71648785 DQ147772 Homo sapiens | GAAGACCACAGACCA |
| NO: 1285 | apolipoprotein B mRNA editing enzyme, | TGGACTAGTTCTGAA |
| | catalytic polypeptide-like 3G | TGGTTTACAGACCTG |
| | (APOBEC3G) gene, comp [symbol] | GCAAATTTTGGTGCC |
| SEQ ID | GI 6537133 AF102137 Homo sapiens | GAGAAAAACCATGTT |
| NO: 1286 | PERI gene, complete cds | TCCAGGGAAGAGGTA |
| | | TCTGCAAACGAGATA |
| | | AGGCCAAAGCCACAG |
| SEQ ID | GI 169234676 NG_007118 Homo sapiens | TAGAGTTCTTGAAGA |
| NO: 1287 | ATP binding cassette subfamily B | TTCTCTTGGCTGCTG |
| | member 4 (ABCB4), RefSeqGene on | GCTGTGGGTACTTTA |
| | chromosome 7 | GGGCATCATTTCCTT |
| SEQ ID | GI 237820664 NG_012051 Homo sapiens | AAATAGCAAGAAAGT |
| NO: 1288 | caveolin 1 (CAV1), RefSeqGene on | GTCTCTGGCCCAAAG |
| | chromosome 7 | AGGCACATTCAATGA |
| | | GCTTGAAGGACAGTG |
| SEQ ID | GI 1143077144 NG_052854 Homo sapiens | GCCCAGGTACTATTG |
| NO: 1289 | gem nuclear organelle associated | TGTCCTTGTCCCTGT |
| | protein 5 (GEMIN5), RefSeqGene | GGGTCCTTCACTGTG |
| | on chromosome 5 | TACTCTAACAAATTC |
| SEQ ID | GI 209529670 NG_008721 Homo sapiens | CAGCTCAATGGCAGT |
| NO: 1290 | LIF, interleukin 6 family cytokine | GCCAATGCCCTCTTT |
| | (LIF), RefSeqGene on chromosome 22 | ATTCTCTATGTAAGT |
| | | TACCCCTGGGATACT |
| SEQ ID | GI 238018099 NG_012213 Homo sapiens | TCCCTTTTACCATCC |
| NO: 1291 | superoxide dismutase 3 (SOD3), | TGGGCATGTTGGCCT |
| | RefSeqGene on chromosome 4 | TATGTTCTCATTCTT |
| | | GTCATTGCATGGATC |
| SEQ ID | GI 281332104 NG_016228 Homo sapiens | ACACTTGTAATCATG |
| NO: 1292 | toll like receptor 1 (TLR1), | TACACAACTGGGAGT |
| | RefSeqGene on chromosome 4 | AGTGGGGATGAGTCT |
| | | GTGGGGAAAAACAGG |
| SEQ ID | GI 283837929 NG_016244 Homo sapiens | GCAATTAAGTGCGAA |
| NO: 1293 | toll like receptor 5 (TLR5), | AGTATGTGGCAGCAT |
| | RefSeqGene on chromosome 1 | CTGCTAGCTCAAAGA |
| | | AGACAGCTAGTGCAG |
| SEQ ID | GI 31657141 NM_181501 Homo sapiens | CAAATGGTTACCCTG |
| NO: 1294 | integrin subunit alpha 1 (ITGA1), mRNA | TGCTGTACCCAACTG |
| | | GATTGTCATCTTCTG |
| | | AGAATGCAAACTGCA |
| SEQ ID | GI 54781374 AY795972 Homo sapiens | TTCCACACGTAGAAA |
| NO: 1295 | matrix metalloproteinase 7 | CCCACTGTGTTTCTC |
| | (matrilysin, uterine) (MMP7) | TGGGTGAAGCACTCT |
| | gene, complete cds | CTATGCAAGGTTTAA |
| SEQ ID | GI 351542176 NG_030342 Homo sapiens | GGAAGAGACAGGAAT |
| NO: 1296 | collectin subfamily member 12 | GGGAAGGAGGTAGTG |
| | (COLEC12), RefSeqGene on | GTAACCATGAACGTT |
| | chromosome 18 | GCTGGAATATTCTGG |
| SEQ ID | GI 190358485 NG_008035 Homo sapiens | GAGATACCTCAGTGC |
| NO: 1297 | carnitine palmitoyltransferase 2 | ACAGAAGCCTCTCTT |
| | (CPT2), RefSeqGene on chromosome 1 | GAATGATGGCCAGTT |
| | | CAGGTAAACACTGAG |
| SEQ ID | GI 189217842 NG_007929 Homo sapiens | GCCAAAGGTAGAAAC |
| NO: 1298 | cytochrome P450 family 2 subfamily | GTGATATGGCACCAT |
| | B member 6 (CYP2B6), RefSeqGene | TGAGAACCTATAGGA |
| | on chromosome 19 | AGTCCAGTGAGCCTT |
| SEQ ID | GI 289666799 NG_016606 Homo sapiens | AGCCCCAGAGTCTAT |
| NO: 1299 | glycerol-3-phosphate dehydrogenase | GAATCAGGTCACTGG |
| | 2 (GPD2), RefSeqGene on chromosome 2 | AGTACAGTTTCTGTC |
| | | AAGTTCTCAGGTGAT |
| SEQ ID | GI 698320876 NM_015995 Homo sapiens | GACACCCCTTCCTGC |
| NO: 1300 | Kruppel like factor 13 (KLF13), | CGCCTTACTCTGTAC |
| | transcript variant 1, mRNA | ATAGATTTGCACTCT |
| | | GGAGTTTTCTGTTAG |
| SEQ ID | GI 594140701 NM_002661 Homo sapiens | GCTGCTGTGTAAAAT |
| NO: 1301 | phospholipase C gamma 2 (PLCG2), mRNA | CCATGCGTGGCCAAA |
| | | GAGAAGTCAGGGGAT |
| | | TATGACATAAATGGT |
| SEQ ID | GI 189217848 NG_007931 Homo sapiens | CATGCTAGAAGCTCA |
| NO: 1302 | cytochrome P450 family 2 subfamily J | CTCTCTTCCAGAGTG |
| | member 2 (CYP2J2), RefSeqGene on | TGAAGCAGATTGAAA |
| | chromosome 1 | GGGGTGACAGGATTT |
| SEQ ID | GI 1135567463 NG_052785 Homo sapiens | GGGGTAAACCTGGAA |
| NO: 1303 | galanin and GMAP prepropeptide (GAL), | TTTCGCGAGCTATCC |
| | RefSeqGene on chromosome 11 | AAAAGCACATGCATT |
| | | GTTCTAAGTCCTCTG |
| SEQ ID | GI 292658838 NG_016860 Homo sapiens | ACTGTCCAGGGAAGA |
| NO: 1304 | pyruvate dehydrogenase (lipoamide) beta | CTAGACTCACTCATG |
| | (PDHB), RefSeqGene on chromosome 3 | AAGTGTTAAGTTCCC |
| | | CATCAGTAGAGCGTG |
| SEQ ID | GI 694879461 NG_031891 Homo sapiens | GTATTCCCTGCTTCA |
| NO: 1305 | sodium voltage-gated channel alpha | GCCAGTTTTCAGCTT |
| | subunit 10 (SCN10A), RefSeqGene on | TCTTAGGTCTGCTCT |
| | chromosome 3 | GTCAGTTACCACTCA |
| SEQ ID | GI 281332105 NG_016229 Homo sapiens | TCTGTGTTAGTCTGG |
| NO: 1306 | toll like receptor 2 (TLR2), | AGGGTGAACCTATTT |
| | RefSeqGene on chromosome 4 | TAATGCAGGAGGGCA |
| | | TAGACTTTTGGGTGG |
| SEQ ID | GI 62953114 NM_012342 Homo sapiens | AAGGTGAAATTCGAT |
| NO: 1307 | BMP and activin membrane bound | GCTACTGTGATGCTG |
| | inhibitor (BAMBI), mRNA | CCCACTGTGTAGCCA |
| | | CTGGTTATATGTGTA |
| SEQ ID | GI 323422857 NM_001565 Homo sapiens | GGAACCTCCAGTCTC |
| NO: 1308 | C-X-C motif chemokine ligand 10 | AGCACCATGAATCAA |
| | (CXCL10), mRNA | ACTGCCATTCTGATT |
| | | TGCTGCCTTATCTTT |
| SEQ ID | GI 2909349 Y12863 Homo sapiens | GACCAACCTTCCATT |
| NO: 1309 | mRNA for growth factor FIGF | CACACCAGCTAAGGA |
| | | GTCCCTGGTTCATTG |
| | | ATGGATGTCTTCTAG |
| SEQ ID | GI 169791020 NM_005328 Homo sapiens | AATCAGCCACTTATA |
| NO: 1310 | hyaluronan synthase 2 (HAS2), mRNA | TCTGGAAGAACAACT |
| | | TCCACGAAAAGGGTC |
| | | CCGGTGAGACAGATG |
| SEQ ID | GI 164695749 AK315559 Homo sapiens | TTCCTACTGGATGTT |
| NO: 1311 | cDNA, FLI96630, Homo sapiens | CTCTCAATAATTGTG |
| | methionyl aminopeptidase 2 (METAP2), mRNA | CTGCCCATTATACTC |
| | | CCAATGCCGGTGACA |
| SEQ ID | GI 32815083 AY340073 Homo sapiens | ATTGCAAAGTTGGGA |
| NO: 1312 | glutamate decarboxylase 2 (pancreatic | GGAGACAGCAGAAAA |
| | islets and brain, 65 kDa) (GAD2) gene, | GGTCATTGCAACCTG |
| | complete cds | TTTCTGCTCTACTTT |
| SEQ ID | GI 1101010097 NG_052015 Homo sapiens | GTCTGCATGTCTCTT |
| NO: 1313 | adenosine deaminase, RNA specific B1 | CCTTCCGGTACTCTG |
| | (ADARB1), RefSeqGene on chromosome 21 | TCTTATGAAATCTGG |
| | | CTGACTTGGTTTCCC |
| SEQ ID | GI 1078569903 NG_051800 Homo sapiens | CCCTCCCACATTTCT |
| NO: 1314 | dedicator of cytokinesis 2 (DOCK2), | GCTGTGTGCCAACTT |
| | RefSeqGene on chromosome 5 | GGAAACTTTCTTCAA |
| | | GATTCTCAACTGTCA |
| SEQ ID | GI 237858713 NG_012098 Homo sapiens | GACTCCTTAGCTTAG |
| NO: 1315 | KIT ligand (KITLG), RefSeqGene on | TGAGGCCATTGGTCC |
| | chromosome 12 | TTGTTTGAACTCTGT |
| | | CTTCCACACCTCAAT |
| SEQ ID | GI 176866166 NG_007524 Homo sapiens | CCTGAGCACCAGACA |
| NO: 1316 | KRAS proto-oncogene, GTPase (KRAS), | TGTATGTATATCAAG |
| | RefSeqGene on chromosome 12 | ATGCCTGCAGGTCAT |
| | | ATCCACCAGGACAAC |
| SEQ ID | GI 210032137 NG_008855 Homo sapiens | CCAGAGCGTCAGTAC |
| NO: 1317 | lipoprotein lipase (LPL), RefSeqGene | TGAGAGGACACTAAG |
| | on chromosome 8 | CATGTGACCTTCACT |
| | | ACTCCTGTTCTGAAT |
| SEQ ID | GI 1147623323 NG_029437 Homo sapiens | AATTTTCCATGCATT |
| NO: 1318 | mitogen-activated protein kinase | TCCATTCAGCGGATC |
| | kinase 6 (MAP2K6), RefSeqGene on | CGAGCCACAGTAAAT |
| | chromosome 17 | AGCCAGGAACAGAAA |
| SEQ ID | GI 269954733 NG_016014 Homo sapiens | TTATAAGAATCACGT |
| NO: 1319 | membrane spanning 4-domains A2 | GTCCAGAACACTCTG |
| | (MS4A2), RefSeqGene on chromosome 11 | ATTCACAGCCAAGGA |
| | | TCCAGAAGGCCAAGG |
| SEQ ID | GI 336088631 NG_029118 Homo sapiens | TCCTCTACCCAGGTC |
| NO: 1320 | RAR related orphan receptor C (RORC), | TCCGGTGTGCATTTG |
| | RefSeqGene on chromosome 1 | GGCGTCTTATCCTCA |
| | | TAAAGTATATAGCTT |
| SEQ ID | GI 241666450 NG_012339 Homo sapiens | TGCAGAGCGCACGTG |
| NO: 1321 | succinate dehydrogenase complex | TTGGATTCTGCCTGG |
| | flavoprotein subunit A (SDHA), | TAAGAGTTTTTCCCA |
| | RefSeqGene on chromoso | TATGATAGCAAAAAA |
| SEQ ID | GI 83699682 DQ314888 Homo sapiens | CAAGTGTAGGAGGAC |
| NO: 1322 | v-rel reticuloendotheliosis viral | TAACAGGCACTGTAG |
| | oncogene homolog (avian) (REL) | CAAACTAAAGAGCCC |
| | gene, complete cds | TGAATAAATGGGGCT |
| SEQ ID | GI 30039656 AY273786 Homo sapiens | GTCACATTCTGCTGT |
| NO: 1323 | tumor necrosis factor, alpha-induced | TGGGGAAACTGAGGC |
| | protein 2 (TNFAIP2) gene, complete cds | ACAGAAAATGGTAGG |
| | | GATTTCATTCACGAG |
| SEQ ID | GI 224809353 NG_011513 Homo sapiens | CAAAGTCCCTTGAGC |
| NO: 1324 | ATP binding cassette subfamily B | GCTTGGTATTTGGAT |
| | member 1 (ABCB1), RefSeqGene on | CTCTCATTACCACGC |
| | chromosome 7 | AATCCATGAGCATTC |
| SEQ ID | GI 291084732 NG_016743 Homo sapiens | TCAGGTGGCCAACTA |
| NO: 1325 | oxidized low density lipoprotein | TGGATTTCTTTCCTC |
| | receptor 1 (OLR1), RefSeqGene on | TCTGTGCCTCAATAA |
| | chromosome 12 | AATAGAGGCCAGGAC |
| SEQ ID | GI 307746866 NG_027761 Homo sapiens | GTTCAGAGTGAGAGA |
| NO: 1326 | heat shock protein family A (Hsp70) | GTTGGAATCTTCTTT |
| | member 5 (HSPA5), RefSeqGene on | CTCAGAAGCACACGT |
| | chromosome 9 | CACTGGCCATGGAAT |
| SEQ ID | GI 1000232109 NG_046737 Homo sapiens | TCCCCATTTCATGAG |
| NO: 1327 | protein phosphatase 1 regulatory subunit | AGGGGATGACTGTAC |
| | 15B (PPP1R15B), RefSeqGene on chromosome 1 | ACACGTCAGTGTGTA |
| | | TTAGGCCATCAAAAC |
| SEQ ID | GI 219879808 NM_000922 Homo sapiens | GTTGCCTTTCTGAGG |
| NO: 1328 | phosphodiesterase 3B (PDE3B), mRNA | GATTTCTGCTCAATG |
| | | CAATACACTGTTCAG |
| | | TGCTATTCTCCCAGC |
| SEQ ID | GI 115298685 NM_006099 Homo sapiens | TTCTTACATCCAGAG |
| NO: 1329 | protein inhibitor of activated STAT 3 | AGGTTCTGCCAGGAG |
| | (PIAS3), mRNA | CCAAATGTGATTATA |
| | | CCATACAGGTGCAGC |
| SEQ ID | GI 166706752 EU332835 Homo sapiens | ATTGCTTCAGTTCTA |
| NO: 1330 | v-akt murine thymoma viral oncogene | ACAGGCCGCAAAACT |
| | homolog l (AKT1) gene, complete cds | GATACCGCTTTTCGG |
| | | GAAATACACGAAACA |
| SEQ ID | GI 327412387 NG_028268 Homo sapiens | TTCTGCTGTATAGGC |
| NO: 1331 | ATP binding cassette subfamily C member 1 | AAAAGCAGAAGGTAA |
| | (ABCC1), RefSeqGene on chromosome 16 | GAATGTTCTGGGCAG |
| | | TGGGAAATGCATGTG |
| SEQ ID | GI 341865614 NG_029559 Homo sapiens | AATTTCTTTTCCCTG |
| NO: 1332 | chordin (CHRD), RefSeqGene on chromosome 3 | GACATCATACCTGCT |
| | | GCTGAAATCCAACAG |
| | | GATGCTTGCTTTCCT |
| SEQ ID | GI 224282141 NG_009873 Homo sapiens | TTATAGCCAGACTGG |
| NO: 1333 | CREB binding protein (CREBBP), RefSeqGene | ACTTGTGTATCTGCT |
| | on chromosome 16 | GTGATCACACACACC |
| | | CGTTTCACCATTCTG |
| SEQ ID | GI 683524074 NG_034246 Homo sapiens | CCTCTCCTGTAAAAT |
| NO: 1334 | lipase E, hormone sensitive type (LIPE), | GGGGATGCTGGCAAT |
| | RefSeqGene on chromosome 19 | AATAGAGATTTGAAC |
| | | CTAGGTGGTGTGGGT |
| SEQ ID | GI 256985185 NG_012797 Homo sapiens | CAGGGCTAAGGTAGG |
| NO: 1335 | membrane bound transcription factor | GAGCTCTGATGGTAG |
| | peptidase, site 2 (MBTPS2), RefSeqGene | CATTTGCTGGTTTCT |
| | on chromosc | GTGGTGTAAATACTT |
| SEQ ID | GI 341865593 NG_029549 Homo sapiens | TGCCTTCCCGGTATG |
| NO: 1336 | TGF-beta activated kinase 1 (MAP3K7) | CCCTATTTCTCTCTG |
| | binding protein 1 (TAB1), RefSeqGene | TGTGTAGTCTTTGCT |
| | on chromoso [symbol] | TAGCTGTTCACATTC |
| SEQ ID | GI 305410826 NG_027551 Homo sapiens | CTGAGGATGGGTCTG |
| NO: 1337 | transient receptor potential cation | AGGAATTCGAGACCA |
| | channel subfamily M member 4 (TRPM4), | TAGTTTTGAAGGCCC |
| | RefSeqGene or [symbol] | TTGTGAAGGGTAAAA |
| SEQ ID | GI 117606531 EF064740 Homo sapiens | GGATTTGTTTATTTC |
| NO: 1338 | Epstein-Barr virus induced gene 3 | CTGTCTTCCCCCTGA |
| | (EBI3) gene, complete cds | TGGATTGTGAGTTCC |
| | | ATGAGGACAGGGGTA |
| SEQ ID | GI 221139797 NG_009359 Homo sapiens | ACCTCAGTCTTCCCA |
| NO: 1339 | chloride voltage-gated channel Ka | TCTTTAAAATGGGGT |
| | (CLCNKA), RefSeqGene on chromosome 1 | GGTTACTGGGAAGGC |
| | | AGAGAAGGAAGAAAG |
| SEQ ID | GI 224809291 NG_011495 Homo sapiens | GACGTCTTGGATAAG |
| NO: 1340 | interferon induced with helicase C | TGCATGGAGGAGGAA |
| | domain 1 (IFIH1), RefSeqGene on | CTGTTGACAATTGAA |
| | chromosome 2 | GACAGAAACCGGGTA |
| SEQ ID | GI 342307076 NG_029608 Homo sapiens | GTTTTACAGATGTGA |
| NO: 1341 | phospholipase D2 (PLD2), | AAAAGCAGGCACTGA |
| | RefSeqGene on chromosome 17 | GAGGTAAGGTAATTT |
| | | GCCCAAGGTCACGCA |
| SEQ ID | GI 393537030 NM_000151 Homo sapiens | CCAGAAAGATTCAGA |
| NO: 1342 | glucose-6-phosphatase catalytic | GTTGGCCAAGAATGA |
| | subunit (G6PC), transcript | ACATTGGCTACCAGA |
| | variant 1, mRNA | CCACAAGTCAGCATG |
| SEQ ID | GI 662033918 NM_014625 Homo sapiens | TCCTTGTGCAAACCA |
| NO: 1343 | NPHS2, podocin (NPHS2), transcript | CTATGAAGCGTCTCC |
| | variant 1, mRNA | TAGCACATCGATCCC |
| | | TCACTGAAATTCTTC |
| SEQ ID | GI 156071494 NM_002787 Homo sapiens | CATGACTGCTTCTAG |
| NO: 1344 | proteasome subunit alpha 2 | AGCTGGGAGGATCTG |
| | (PSMA2), mRNA | CAGACTTTCACGGAT |
| | | TCATGGAACAAGAAA |
| SEQ ID | GI 57165045 AY864066 Homo sapiens | TGCAAAATCGAGGAC |
| NO: 1345 | cyclin B2 (CCNB2) gene, complete cds | ATTGATAACGAAGAT |
| | | TGGGAGAACCCTCAG |
| | | CTCTGCAGTGACTAC |
| SEQ ID | GI 1049010846 AH002874 Homo sapiens | GCTGGATTTTTGCAC |
| NO: 1346 | MC-CPA gene, complete sequence; | ATCCAAAGATACTGC |
| | and carboxypeptidase A (CPA3) | TCCCTGAAGCAGCCA |
| | gene, complete cds | CTTAACAAGTGAGAA |
| SEQ ID | GI 1049011196 AH002836 Homo sapiens | GACAACAAATGTAAG |
| NO: 1347 | 1g J-chain gene, complete cds; | TGTGCCCGGATTACT |
| | and IGJ gene, complete sequence | TCCAGGATCATCCGT |
| | | TCTTCCGAAGATCCT |
| SEQ ID | GI 342349316 NG_029618 Homo sapiens | TTGTGCCCTATTACT |
| NO: 1348 | CD28 molecule (CD28), RefSeqGene | TAACCTTGAGGGACA |
| | on chromosome 2 | TAGAGAGCATGAGAC |
| | | ACCAAGGGGCTTTTG |
| SEQ ID | GI 1025608659 NG_047042 Homo sapiens | TTCCTCACGTTACTC |
| NO: 1349 | cell division cycle 42 (CDC42), | ATATAATTACCGTGT |
| | RefSeqGene on chromosome 1 | GATCGTGTGGTGCTC |
| | | TGCTGCTTGTTGGTC |
| SEQ ID | GI 1028908925 NG_050621 Homo sapiens | TCAAAGTCCAATCAC |
| NO: 1350 | glutathione peroxidase 4 (GPX4), | GGTGACTCAGTTCCC |
| | RefSeqGene on chromosome 19 | AAGTATGAGATGAGT |
| | | GTTTCTGTTGCCACA |
| SEQ ID | GI 336285218 NG_029143 Homo sapiens | CCACGCTCACAACCC |
| NO: 1351 | mitogen-activated protein kinase | TCCAGTGATTTCCAT |
| | kinase 5 (MAP2K5), RefSeqGene on | CTCACTCCAAAGTAA |
| | chromosome 15 | AAGACCAAGTCCTTA |
| SEQ ID | GI 342307060 NG_029601 Homo sapiens | CAACGTGAAAACTGG |
| NO: 1352 | Pim-1 proto-oncogene, serine/threonine | TTAAATCAAGCGCAC |
| | kinase (PIM1), RefSeqGene on | CCTCCCACCCTCGTT |
| | chromosome 6 | TTAGATGAGGAATTT |
| SEQ ID | GI 588480539 NG_033255 Homo sapiens | TGAGAGGTATTTAAC |
| NO: 1353 | ras homolog family member H (RHOH), | ATGTCAGTGGGAAGG |
| | RefSeqGene on chromosome 4 | AATTTCTATTCACTG |
| | | CAGTGGGCTGTCCCC |
| SEQ ID | GI 33333853 AF546700 Homo sapiens | GGACTTCAATTTCTT |
| NO: 1354 | androgen regulated a/b hydrolase II | CACCTCTAAAATGGG |
| | (ABHD2) mRNA, complete cds | GGACTTGGACCAGGT |
| | | AGATTGCTGAGCTCA |
| SEQ ID | GI 21885466 AY128534 Homo sapiens | CATTGACTTTGTGGT |
| NO: 1355 | cyclin-dependent kinase 6 (CDK6) | GGCAACACAGTCAGT |
| | gene, complete cds | TCTAGACAGCTTTGC |
| | | TGGGAGGAAAATCAA |
| SEQ ID | GI 7637751 AF250378 Homo sapiens | TTGACCACGAGTCTT |
| NO: 1356 | E2F transcription factor 4 (E2F4) | CTTCTGTAGGTCTTG |
| | gene, complete cds | TGTCCCTGTCTCCTG |
| | | TGGTGACTAATTTCA |
| SEQ ID | GI 90657247 DQ449938 Homo sapiens | ATGTCTCCAGGGGCA |
| NO: 1357 | Fas (TNFRSF6)-associated via death | CCAAAGAATGCATTT |
| | domain (FADD) gene, complete cds | TCCACGTTTGTCCCT |
| | | AAACGTTAATGCATA |
| SEQ ID | GI 88698111 DQ388429 Homo sapiens | GTCAGGCCCTACCAT |
| NO: 1358 | heat shock 70 kDa protein 1B (HSPA1B) | TGAGGAGGTGGATTA |
| | gene, complete cds | GGGGCCTTTGTTCTT |
| | | TAGTATGTTTGTCTT |
| SEQ ID | GI 237874185 NG_012167 Homo sapiens | CCAGTTTCCCTGGTG |
| NO: 1359 | CD209 molecule (CD209), RefSeqGene | TAAATATTCCCATGG |
| | on chromosome 19 | TGGCTGATTTCAAGC |
| | | TGTCGTTGTGATGTC |
| SEQ ID | GI 301336145 NG_023427 Homo sapiens | TAAGCTGATGTTTGA |
| NO: 1360 | myocyte enhancer factor 2C (MEF2C), | TTTAATTGTGAGTTC |
| | RefSeqGene on chromosome 5 | CTGGGGCCTCCAGGC |
| | | CTCCTTCATCTGTAA |
| SEQ ID | GI 541862110 NM_017434 Homo sapiens | CATTTTGGGACATTC |
| NO: 1361 | dual oxidase 1 (DUOX1), transcript | TAATCCCTGAGCCCC |
| | variant 1, mRNA | TATTATTTTCATCAT |
| | | GGGCTTCTGCCTGGC |
| SEQ ID | GI 209977115 NM_153692 Homo sapiens | TGGTGATGTGATTGG |
| NO: 1362 | HtrA serine peptidase 4 (HTRA4), | CGTCAATTCATTGAG |
| | mRNA | GGTGACTGATGGAAT |
| | | CTCCTTTGCAATTCC |
| SEQ ID | GI 157909838 NM_006252 Homo sapiens | AGCTGGAACATTGTT |
| NO: 1363 | protein kinase AMP-activated | ACAGCAGGCTTTTTG |
| | catalytic subunit alpha 2 (PRKAA2), | TTGCTCATGGGCAGA |
| | mRNA | TAGAGGGAAAGAATC |
| SEQ ID | GI 27979118 AY219866 Homo sapiens | TGCCATGCTGAAACA |
| NO: 1364 | caspase 3, apoptosis-related cysteine | GTATGCCGACAAGCT |
| | protease (CASP3) gene, complete cds | TGAATTTATGCACAT |
| | | TCTTACCCGGGTTAA |
| SEQ ID | GI 56788327 AY851164 Homo sapiens | CATGGCTAGCCCAAG |
| NO: 1365 | carboxylesterase 2 (intestine, liver) | AATCCGACATTTCCC |
| | (CES2) gene, complete cds | CCATTTCACAGACGA |
| | | GCAAATTGAAGTTAG |
| SEQ ID | GI 345441766 NG_029866 Homo sapiens | TTTCCACATGGTTAG |
| NO: 1366 | DnaJ heat shock protein family (Hsp40) | TTGATCTGATGTTTC |
| | member A3 (DNAJA3), RefSeqGene on | TGCCAGGGGCATGAG |
| | chromosome | TTTTGGAGAGTCCTA |
| SEQ ID | GI 215820636 NG_009079 Homo sapiens | CCAACCATGCTTTAC |
| NO: 1367 | malonyl-CoA decarboxylase (MLYCD), | AGAGAGAGTTTCCTC |
| | RefSeqGene on chromosome 16 | ACCTTGGGGTGTTTT |
| | | CAAGTCTGTCACCTA |
| SEQ ID | GI 207444685 NG_008651 Homo sapiens | CTGGGAGCATGAGGG |
| NO: 1368 | NLRfamily pyrin domain containing 12 | TAGATAAGCTGGATG |
| | (NLRP12), RefSeqGene on chromosome 19 | GACAAATACGTTATG |
| | | CACTGGTGTATGCAA |
| SEQ ID | GI 1068937316 NG_051332 Homo sapiens | CCGTGTCTATTGGCA |
| NO: 1369 | pyruvate dehyrogenase phosphatase | GGAACTGCTTGATTT |
| | catalytic subunit 2 (PDP2), | GCACATGGAAATGGG |
| | RefSeqGene on chromosoi | ACTAAGCATTGAAGA |
| SEQ ID | GI 260898757 NM_021571 Homo sapiens | CATTCAGTGGGTGCA |
| NO: 1370 | caspase recruitment domain | GGCACAATAAATGCC |
| | family member 18 (CARD18), mRNA | TTGCTGGATTGCCTA |
| | | TTAGAGGATGAAGTT |
| SEQ ID | GI 325652102 NM_002811 Homo sapiens | GACCAGTGAAATTGG |
| NO: 1371 | proteasome 26S subunit, non-ATPase 7 | AGCAGAGGAAGCTGA |
| | (PSMD7), mRNA | GGAAGTTGGAGTTGA |
| | | ACACTTGTTACGAGA |
| SEQ ID | GI 385198082 NM_005226 Homo sapiens | CTTGTCCACTTTGGG |
| NO: 1372 | sphingosine-1-phosphate receptor 3 | CTCCAGAGTCTTTCA |
| | (S1PR3), mRNA | GATGTACTAAGCTGC |
| | | TGACATCATCCACTG |
| SEQ ID | GI 117606555 EF064752 Homo sapiens | TCTAACCCAAGAGTC |
| NO: 1373 | CD5 molecule (CD5) gene, complete cds | AGAGATGGGGCTGGT |
| | | CATGTTCCTTTGGTT |
| | | TGAATAACTCCCTTG |
| SEQ ID | GI 262331523 NG_013339 Homo sapiens | AGAATTAGGTGATAG |
| NO: 1374 | catalase (CAT), RefSeqGene on | AGGCTACATCCAGGA |
| | chromosome 11 | GCTGCCCATGGCAGG |
| | | ATTGTATCTCCTATC |
| SEQ ID | GI 339515631 NG_029366 Homo sapiens | ATTTCAAACGCCACT |
| NO: 1375 | coagulation factor III, tissue factor | TCCACCAGAAGGCCT |
| | (F3), RefSeqGene on chromosome 1 | TGCTACTGCACCAAC |
| | | TAGTTACTATCTCTT |
| SEQ ID | GI 319803083 NG_011853 Homo sapiens | TCATATTCACCTAGG |
| NO: 1376 | galactosylceramidase (GALC), | GCCATGTGCTTACCT |
| | RefSeqGene on chromosome 14 | AGTTAAATGCTTTTC |
| | | CTGCACCACTGGACA |
| SEQ ID | GI 161086967 NG_007121 Homo sapiens | CATTGACTCTGCAAA |
| NO: 1377 | hydroxyacyl-CoA dehydrogenase/ | ATACTGCCACTTAGC |
| | 3-ketoacyl-CoA thiolase/enoyl-CoA | TGGCACTGTGATGGA |
| | hydratase (trifunctiona [symbol] | GTCTTCAGTAGTCCA |
| SEQ ID | GI 341865570 NG_029565 Homo sapiens | TGATCAGCCTACTGC |
| NO: 1378 | interleukin 24 (IL24), RefSeqGene | CTCCTTTCCCAATAA |
| | on chromosome 1 | GGTCATGTTCTTCTC |
| | | TTCCTCTGCTCCTAT |
| SEQ ID | GI 937500889 NG_032896 Homo sapiens | TTCTCTTCCTCTGTC |
| NO: 1379 | purinergic receptor P2Y1 (P2RY1), | CCCCAAATACTGTTC |
| | RefSeqGene on chromosome 3 | AGGCACTATTTCTCC |
| | | TCCTGTACTTCCCTC |
| SEQ ID | GI 1005261235 NM_000399 Homo sapiens | AAGACAAGCAAAACT |
| NO: 1380 | early growth response 2 (EGR2), | GATGTGCACTTTATG |
| | transcript variant 1, mRNA | GCTTGGGACTGATTT |
| | | GGGGGACATTGTACA |
| SEQ ID | GI 118722343 NM_030949 Homo sapiens | AATAAACTTGTGGTT |
| NO: 1381 | protein phosphatase 1 regulatory | GTCCTTTAACTGGAG |
| | inhibitor subunit 14C (PPP1R14C), mRNA | GTCCCAGCACATGTG |
| | | TTTTCAAGAGGCCAC |
| SEQ ID | GI 109809760 NM_014445 Homo sapiens | GTTACTGTGGTTTCA |
| NO: 1382 | stress associated endoplasmic | CTAAAAGCTACCGTG |
| | reticulum protein 1 (SERP1), mRNA | GTGGAGTGAAGTCAG |
| | | TCAGGGAAGGTTTGT |
| SEQ ID | GI 154482086 EU048234 Homo sapiens | TGTGTGTACCAATGC |
| NO: 1383 | CCAAT/enhancer binding protein | GGGCTGGGGCATTTT |
| | (C/EBP), alpha (CEBPA) gene, | CGAGAAATTACACAT |
| | complete cds | TCCTTTTACACTCTG |
| SEQ ID | GI 292494880 NG_007148 Homo sapiens | CCTGTCTGACTCCTA |
| NO: 1384 | ATPase phospholipid transporting 8B1 | CATGTCCTGTAGGTC |
| | (ATP8B1), RefSeqGene on chromosome 18 | TCAGGTTAGACCTCA |
| | | ATTTCTGCAACACCT |
| SEQ ID | GI 334848115 NG_029039 Homo sapiens | GACCTTTGCTCTGAA |
| NO: 1385 | major histocompatibility complex, | TGACATGGGGAGTTA |
| | class 1, G (HLA-G), RefSeqGene on | GAGGACAGTTTTGGA |
| | chromosome 6 | AAGTGGGACATGGTA |
| SEQ ID | GI 514825583 NG_033271 Homo sapiens | CGCATCCGGGAAGGA |
| NO: 1386 | Kruppel like factor 10 (KLF10), | GTAGAATCAGCAATT |
| | RefSeqGene on chromosome 8 | CTAGTTTTGGATATG |
| | | TTGTCTGAGGAGCCC |
| SEQ ID | GI 359751452 NG_031884 Homo sapiens | GCTCCATCGATCCCT |
| NO: 1387 | mitogen-activated protein kinase | TCACATTTGTCTCCT |
| | kinase kinase 1 (MAP3K1), RefSeqGene | GGTTTACGAGATGTG |
| | on chromosome 5 | GCTCTTCGTTGTTTA |
| SEQ ID | GI 281332104 NG_016228 Homo sapiens | GCAATGATCAACAAA |
| NO: 1388 | toll like receptor 1 (TLR1), | GCCTGAGTGATCTTG |
| | RefSeqGene on chromosome 4 | GCCCTAACTCCTCTC |
| | | ATCTTCCCTAACTCC |
| SEQ ID | GI 209447071 NM_005639 Homo sapiens | AGAGCAAGAGAAATT |
| NO: 1389 | synaptotagmin 1 (SYT1), transcript | GGGTGATATCTGCTT |
| | variant 1, mRNA | CTCCCTTCGCTACGT |
| | | ACCTACTGCTGGTAA |
| SEQ ID | GI 1049010711 AH003036 Homo sapiens | CTAAGCATCCACTTC |
| NO: 1390 | Bruton agammaglobulinemia (BTK) | TTCAGGGACCCTCAA |
| | gene, complete cds | GGGGTGATACGTCAT |
| | | TATGTTGTGTGTTCC |
| SEQ ID | GI 46241839 AY588246 Homo sapiens | TTGATGAGGTGTCCC |
| NO: 1391 | epidermal growth factor receptor | TCATCCTCTCTTAGC |
| | (erythroblastic leukemia viral | TGAAAATCAGCAGCT |
| | (v-erb-b) oncogene homolog, a [symbol] | GCCTCAACTTCTTTT |
| | | C |
| SEQ ID | GI 190570161 NG_008053 Homo sapiens | CCTTACTCCCTCCTT |
| NO: 1392 | acyl-CoA synthetase long chain | CTGTTGTACCTAATG |
| | family member 4 (ACSL4), RefSeqGene | TCCATGAGTCCCGAG |
| | on chromosome X | TCTCTGCTTCAGTTT |
| SEQ ID | GI 344030205 NG_029797 Homo sapiens | TTTTCACTGAGTTGA |
| NO: 1393 | glutaredoxin (GLRX), RefSeqGene | AGCCACAGCATTTTC |
| | on chromosome 5 | TGAGAAATGGAGAGG |
| | | ACACCCGTTCTTTGC |
| SEQ ID | GI 222144288 NG_009492 Homo sapiens | CTGAAGTCTTGACTG |
| NO: 1394 | insulin like growth factor 1 receptor | ACTCAGTACCTGCCC |
| | (IGF1R), RefSeqGene on chromosome 15 | CTCCCTCCATCTCTG |
| | | AAATGTGGAGAATTA |
| SEQ ID | GI 270483830 NG_016181 Homo sapiens | TCAGGAGATAGCTTG |
| NO: 1395 | sphingosine-1-phosphate receptor 1 | AGAATGCAATTTTTA |
| | (SIPR1), RefSeqGene on chromosome 1 | GGGCCTCCTTGGAGA |
| | | GCAATGGGAAGAGAC |
| SEQ ID | GI 815930042 NM_001308319 Homo sapiens | AATCCATCCCCAAAA |
| NO: 1396 | chromodomain helicase DNA binding | CCAACCCAATGGTTT |
| | protein 9 (CHD9), transcript | GTTTCCAGATGTATC |
| | variant 1, mRNA | AGATGGCAGTCCAAT |
| SEQ ID | GI 181979 M29366 Human epidermal | ATCAGTATGGAGGAG |
| NO: 1397 | growth factor receptor (ERBB3) | TTTGTGTAGCCAGCT |
| | mRNA, complete cds | GTCCCCATAACTTTG |
| | | TGGTGGATCAAACAT |
| SEQ ID | GI 208879434 NM_004895 Homo sapiens | AAAAGAGATGAGCCG |
| NO: 1398 | NLRfamily pyrin domain containing 3 | AAGTGGGGTTCAGAT |
| | (NLRP3), transcript variant 1, mRNA | AATGCACGTGTTTCG |
| | | AATCCCACTGTGATA |
| SEQ ID | GI 23955951 AF549495 Homo sapiens | TGGAACAAGAAGAGA |
| NO: 1399 | cyclin G2 (CCNG2) gene, complete cds | GATTCCAACCTCGAG |
| | | AAAAAGGGCTGAGTT |
| | | TGATTGAGGCTACCC |
| SEQ ID | GI 117606491 EF064720 Homo sapiens | GGGGAAGGGAATGGA |
| NO: 1400 | interleukin 27 (IL27) gene, complete cds | ATAGGGTTAGGAATG |
| | | AGGTTGGAGATGGGA |
| | | TGGAAAGATGGAAAG |
| SEQ ID | GI 170560906 EU567146 Homo sapiens | CGCTTACCCCATGTT |
| NO: 1401 | solute carrier family 22 (organic anion | TCCCAAATGAGGAAT |
| | transporter), member 6 (SLC22A6) | CCAAGGCCAAGAAGA |
| | gene, complete cds | AGGGAAAGGATTTAC |
| SEQ ID | GI 389565477 NG_032771 Homo sapiens | GCATATACAGTGTTC |
| NO: 1402 | bone morphogenetic protein 7 (BMP7), | TCCAGCTGACTTATC |
| | RefSeqGene on chromosome 20 | TCGGAGACTGGTCCT |
| | | GTCAGCCGTTAAAGA |
| SEQ ID | GI 211904170 NG_008937 Homo sapiens | GGCAGAGGGATGAGA |
| NO: 1403 | CD44 molecule (Indian blood group) | ATCTTCGTAGACCAT |
| | (CD44), RefSeqGene on chromosome 11 | ACAAACCCAGCCCCA |
| | | CATTGTTATGTAAGG |
| SEQ ID | GI 334848119 NG_029043 Homo sapiens | GCAGATATTGGGAAA |
| NO: 1404 | Fc fragment of IgE receptor Ig (FCER1G), | GAGAAGGGGTAGTGA |
| | RefSeqGene on chromosome 1 | GTAATCATGAATGGC |
| | | GAGGGTCTTGAAGGC |
| SEQ ID | GI 325053739 NG_028167 Homo sapiens | AGCTAAGGATTGGAA |
| NO: 1405 | growth differentiation factor 3 (GDF3), | TGACAACCCCCGGAA |
| | RefSeqGene on chromosome 12 | AAATTTCGGGTTATT |
| | | CCTGGAGATACTGGT |
| SEQ ID | GI 255652922 NG_012646 Homo sapiens | TCTGAGGATAGCACT |
| NO: 1406 | transforming growth factor beta | GTGGTTCTGTGACAG |
| | induced (TGFBI), RefSeqGene on | ATAATGAAGGATTTG |
| | chromosome 5 | GAAGCAGGAATGCCC |
| SEQ ID | GI 1040975354 NM_001737 Homo sapiens | AAGCACACCTTTTGA |
| NO: 1407 | complement C9 (C9), mRNA | CAATGAGTTCTACAA |
| | | TGGACTCTGTAACCG |
| | | GGATCGGGATGGAAA |
| SEQ ID | GI 666637974 NM_005922 Homo sapiens | GAAGGAGCTCTTCCA |
| NO: 1408 | mitogen-activated protein kinase | TGAAGCCAGAGAAAG |
| | kinase kinase 4 (MAP3K4), | GGCTTCCAAAGCACT |
| | transcript variant 1, mRNA | TGGATTTGCTAAAAT |
| SEQ ID | GI 297374833 NM_006184 Homo sapiens | GCAGGATCCCAATGT |
| NO: 1409 | nucleobindin 1 (NUCB1), mRNA | ACAGGTGGATCATCT |
| | | GAATCTCCTGAAACA |
| | | GTTTGAACACCTGGA |
| SEQ ID | GI 195222745 NM_018290 Homo sapiens | TAATTCGTGGTCTTA |
| NO: 1410 | phosphoglucomutase 2 (PGM2), mRNA | CAGCCTTCCAAAATA |
| | | ACTCCAGTTGGGCAC |
| | | CCATGAGCTAGGATC |
| SEQ ID | GI 21914799 AY131997 Homo sapiens | TGAAGTAACCTGCCA |
| NO: 1411 | tumor necrosis factor receptor | ATTCCCAATCAAAAA |
| | superfamily, member 1A (TNFRSF1A) | CACATCCTTTCAACA |
| | gene, complete cds | TCTGCCCTGTGTCCA |
| SEQ ID | GI 163954918 NG_007084 Homo sapiens | TTCTCTCTCTCAGCT |
| NO: 1412 | apolipoprotein E (APOE), RefSeqGene | TTGTCTCTCTCTCTT |
| | on chromosome 19 | CCCTTCTGACTCAGT |
| | | CTCTCACACTCGTCC |
| SEQ ID | GI 345478654 NG_029871 Homo sapiens | TTAGTCTTTTCCCAC |
| NO: 1413 | activating transcription factor 3 | TTCTACTGCCTACAA |
| | (ATF3), RefSeqGene on chromosome 1 | TACCCAATCAGTTCC |
| | | TTCCCACCCCAATGC |
| SEQ ID | GI 1024846760 NG_046988 Homo sapiens | TCTGAAAGAGGAGAT |
| NO: 1414 | E2F transcription factor 1 (E2F1), | CTGCATAAATGAGAA |
| | RefSeqGene on chromosome 20 | AATCGGGAAAGGCGT |
| | | TCTGGAATGGGTGGT |
| SEQ ID | GI 284813593 NG_016440 Homo sapiens | GCATCTGCTCCAAAA |
| NO: 1415 | MAF bZIP transcription factor (MAF), | CTGCTTTGAGTTACT |
| | RefSeqGene on chromosome 16 | CAGAACTTCAACCTC |
| | | CCAATGCACTGAAGG |
| SEQ ID | GI 237858770 NG_012124 Homo sapiens | AGAGCAAGCAAGTGC |
| NO: 1416 | selectin E (SELE), RefSeqGene | AGTGTTTATTAACCA |
| | on chromosome 1 | AGGTGTGGTGTGGTA |
| | | TTGTGAACGAGCTTG |
| SEQ ID | GI 1147566 X80590 H. sapiens PHKGI mRNA | CAGGGCACCCCAACA |
| NO: 1417 | | TCATACAGCTGAAGG |
| | | ACACTTATGAGACCA |
| | | ACACTTTCTTCTTCT |
| SEQ ID | GI 80861465 NM_014331 Homo sapiens | GAGTCCATTTAGCCC |
| NO: 1418 | solute carrier family 7 member 11 | AGTGGGAAAGTCTTG |
| | (SLC7A11), mRNA | GAACTCAGGTTACCC |
| | | TTGAAGGATATGCTG |
| SEQ ID | GI 163954918 NG_007084 Homo sapiens | TCTTGCTGCTGAACC |
| NO: 1419 | apolipoprotein E (APOE), RefSeqGene | ACGGGTTTCTCCTCT |
| | on chromosome 19 | GAAACATCTGGGATT |
| | | TATAACAGGGCTTAG |
| SEQ ID | GI 299116025 NG_023038 Homo sapiens | GGCTTCCACGCAAGC |
| NO: 1420 | autophagy related 16 like 1 (ATG16L1), | ATAATCTAGCTTTGT |
| | RefSeqGene on chromosome 2 | GGTTCCTCATAGGAC |
| | | ACATGCAGAAAATGG |
| SEQ ID | GI 696221409 NG_041768 Homo sapiens | AAAACTCCGATCTGC |
| NO: 1421 | CD24 molecule (CD24), RefSeqGene on | CTTTGTTCCATGACA |
| | chromosome 6 | AAGGAGAGATTATCA |
| | | CGTGCCCTACTGGAC |
| SEQ ID | GI 225007613 NG_011612 Homo sapiens | GTAGAGACTGGTGTG |
| NO: 1422 | upstream transcription factor 1 (USF1), | AGGTTAGATGTATGC |
| | RefSeqGene on chromosome 1 | TGAAACCTCTGTGTG |
| | | GGGAAAGAAGGGAGA |
| SEQ ID | GI 974005408 NM_015133 Homo sapiens | GAATGGGCAAAGAAG |
| NO: 1423 | mitogen-activated protein kinase 8 | TGGGGAATCTGCTAC |
| | interacting protein 3 (MAPK8IP3), | TGGAAAACTCACAGC |
| | transcript variant 1, [symbol] | TTCTGGAAACCAAAA |
| SEQ ID | GI 1145587777 KX533498 Homo sapiens | AAGCTGCTTTTCACC |
| NO: 1424 | macrophage receptor (MARCO) | AAATTGCAATGGAGC |
| | mRNA, complete cds | CTTTCGAAATCAATG |
| | | TTCCAAAGCCCAAGA |
| SEQ ID | GI 1036032720 AH002608 Homo sapiens | CTTCACAGAAATGGG |
| NO: 1425 | amphiregulin (AREG) gene, complete cds | TGGGAAGGGGCTCTT |
| | | GATTGAGATAGAAGC |
| | | CCATCCTACATGAAG |
| SEQ ID | GI 306482660 NG_027673 Homo sapiens | GCAGACACAAAGACA |
| NO: 1426 | activating transcription factor 1 | GTTCATACCCTCTTG |
| | (ATF1), RefSeqGene on chromosome 12 | TAGGTTTTTCTCCAA |
| | | GGACCTCCAGCAGTT |
| SEQ ID | GI 906847382 NG_042271 Homo sapiens | TTTGCTCAGCCCAAC |
| NO: 1427 | calcium voltage-gated channel subunit | CCTAACCCTAACTCC |
| | alphal B (CACNA1B), RefSeqGene on | TACCAGCCAATTCAA |
| | chromosome 9 | GGTGATGATTAGATG |
| SEQ ID | GI 334085262 NG_029008 Homo sapiens | AGTGCTCTCCTTATT |
| NO: 1428 | CRK proto-oncogene, adaptor protein | CTCCTCCTGCAGGTC |
| | (CRK), RefSeqGene on chromosome 17 | GGTGAGCTGGTAAAG |
| | | GTTACGAAGATTAAT |
| SEQ ID | GI 1159261282 NG_052987 Homo sapiens | GCTTTCTGTTGCTAG |
| NO: 1429 | zinc finger protein 148 (ZNF148), | ATTGGTGGTTGGGAA |
| | RefSeqGene on chromosome 3 | ATGCCAGGTCTGGAT |
| | | TGTCTTCTTCTGTTG |
| SEQ ID | GI 30841527 AY277591 Homo sapiens | ATATGGAGCTCTCAT |
| NO: 1430 | GalNAc-T5 (GALNT5) mRNA, complete cds | TCAAGGTGTGGATGT |
| | | GTGGTGGTGAAATTG |
| | | AGATCATTCCCTGCT |
| SEQ ID | GI 27369416 AY166858 Homo sapiens | GGCAGGAACAGTTCT |
| NO: 1431 | TGS1 mRNA, complete cds | TTAGCTGTCGGCGTA |
| | | AATGACCAAGTTCAT |
| | | GACCTATCAAGGTCT |
| SEQ ID | GI 117606529 EF064739 Homo sapiens | CACAATTCCACCTGC |
| NO: 1432 | Fas ligand (TNF superfamily, | ATCTGCATGATCTCT |
| | member 6) (FASLG) gene, complete cds | TCCTTCCACCTGGTC |
| | | TCAGTGGAGAAATAG |
| SEQ ID | GI 27357272 AY195619 Homo sapiens | ACCAAGAGCAGAGAC |
| NO: 1433 | interleukin 10 receptor, alpha | AGAGAGCAAGGACCG |
| | (IL10RA) gene, complete cds | AAACTGCTTCTTCAT |
| | | GACACCAAAATACAA |
| SEQ ID | GI 14278713 AF377330 Homo sapiens | TGTCTGTGCTAGGAT |
| NO: 1434 | urokinase-type plasminogen activator | ATAGAACTTGGAGAA |
| | (PLAU) gene, complete cds | TGGAGCCTTGGGATG |
| | | GATTCCAGCCTAACT |
| SEQ ID | GI 1028630732 NG_050570 Homo sapiens | CTGTGGGGTCATGAT |
| NO: 1435 | carnitine palmitoyltransferase 1C | TGAGTTTGAATCCTG |
| | (CPT1C), RefSeqGene on chromosome 19 | ACTCCACCGCTTAGT |
| | | AGCTGTGTCATCTTG |
| SEQ ID | GI 283945491 NG_016362 Homo sapiens | ACAGCTTCAGCGATG |
| NO: 1436 | C-X3-C motif chemokine receptor 1 | TCAGATTTTTTATGT |
| | (CX3CR1), RefSeqGene on chromosome 3 | AAATGGTGCCTTCAC |
| | | ATGCTCTGGGGCATT |
| SEQ ID | GI 212549728 NG_008977 Homo sapiens | ATTTGGAAAAGGCTG |
| NO: 1437 | methylmalonyl-CoA epimerase (MCEE), | CAGCATTTTATAAGA |
| | RefSeqGene on chromosome 2 | ATATTCTGGGGGCCC |
| | | AGGTAAGTGAAGCGG |
| SEQ ID | GI 229577384 NG_011990 Homo sapiens | ACAACCAAGAACTTT |
| NO: 1438 | SMAD family member 3 (SMAD3), | TCCCCACCAGGAGTG |
| | RefSeqGene on chromosome 15 | GGTATATTTCAACTT |
| | | CTGTAATCCCTGCGT |
| SEQ ID | GI 227908772 NG_011947 Homo sapiens | TTTAAGCACATGGAC |
| NO: 1439 | tryptophan hydroxylase 1 (TPH1), | TGTGGAGCTGGACAG |
| | RefSeqGene on chromosome 11 | ACTAGATTTGAATTC |
| | | CGGCTCTGACACTTG |
| SEQ ID | GI 111161293 NM_005746 Homo sapiens | TGGTATTTGGCCATC |
| NO: 1440 | nicotinamide phosphoribosyltransferase | TCCATTCTGAGCACC |
| | (NAMPT), mRNA | AAACGGTTAACACGA |
| | | ATGTCCACTAGAACT |
| SEQ ID | GI 152112977 EU012027 Homo sapiens | GGTACAACACGCCTC |
| NO: 1441 | high-mobility group box 1 (HMGB1) | CTGAAAGGGTCTGAT |
| | gene, complete cds | AGCTTTCAGTAGCAG |
| | | TAAGACACTTGCATG |
| SEQ ID | GI 302128095 AB542701 Homo sapiens | GCTCACCATTGTATC |
| NO: 1442 | NOD2 gene for nucleotide-binding | TTCTTTTCCAGGTTG |
| | oligomerization domain containing 2, | TCCAATAACTGCATC |
| | | ACCTACCTAGGGGCA |
| SEQ ID | GI 262331523 NG_013339 Homo sapiens | TGTTCACTGGACCTG |
| NO: 1443 | catalase (CAT), RefSeqGene on | CATCTTAACTCTGAG |
| | chromosome 11 | GCTGGCATTGTTAAA |
| | | CACCTGTAGTACTGC |
| SEQ ID | GI 1024846796 NG_046983 Homo sapiens | ACCTCTAATTTGTTT |
| NO: 1444 | cAMP responsive element binding | CCTGATTCCCAGTAC |
| | protein 3 (CREB3), RefSeqGene on | CGGCTTGGACATTCA |
| | chromosome 9 | TCCCTTTCCTAGCAC |
| SEQ ID | GI 335892864 NG_029105 Homo sapiens | GTTGTTGACAAAAAC |
| NO: 1445 | interleukin 1 receptor accessory | GAAAAGAGCAACTGG |
| | protein (ILIRAP), RefSeqGene on | CTCTGGGCTAGTGGG |
| | chromosome 3 | GGAAGAAAGAAATCA |
| SEQ ID | GI 169808406 NG_007450 Homo sapiens | TTGTTCACCATTGCA |
| NO: 1446 | leptin (LEP), RefSeqGene on chromosome 7 | TCCTCGGTGCTGAGC |
| | | ACTGCGTCTGACATA |
| | | TTATTTAGAAGGTCA |
| SEQ ID | GI 289802979 NG_016616 Homo sapiens | GAGTTGGTGATAGCC |
| NO: 1447 | phosphorylase kinase catalytic subunit | TGAGCAAGGAAATCC |
| | gamma 2 (PHKG2), RefSeqGene | TTGTCTAGGACTTTG |
| | on chromosome 16 | TGTGTGCCTCATGAA |
| SEQ ID | GI 224809271 NG_011477 Homo sapiens | CAGAGCATTGCCCTT |
| NO: 1448 | TNF superfamily member 4 (TNFSF4), | AAGCACGAAGGGCAC |
| | RefSeqGene on chromosome 1 | TAATTAGCTATCACA |
| | | CCACGAAGAGTACAG |
| SEQ ID | GI 806607 M90696 Homo sapiens | ATGGAAACAAAGGCT |
| NO: 1449 | cathepsin S (CTSS) mRNA, complete | GCAATGGTGGCTTCA |
| | cds | TGACAACGGCTTTCC |
| | | AGTACATCATTGATA |
| SEQ ID | GI 476704 L26336 Homo sapiens | GGGGAAAACAAGCTG |
| NO: 1450 | heat shock protein (HSPA2) gene, | CTCGAGCTTTATTTC |
| | complete cds | TTCGGTGCAACCAAC |
| | | TCAGAATGAATTCCT |
| SEQ ID | GI 225735573 NG_011718 Homo sapiens | ACTTAGTTCCACCTG |
| NO: 1451 | alcohol dehydrogenase 1C (class 1), | CAGAGATTCTCATTT |
| | gamma polypeptide (ADHIC), | AATTGGCATGGGCTA |
| | RefSeqGene on chromosoi | TGACCTGGACTGTGG |
| SEQ ID | GI 238018066 NG_012196 Homo sapiens | CAGTATGTCTTCTCC |
| NO: 1452 | fibronectin 1 (FN1), RefSeqGene | TATCTCTATCTCCCC |
| | on chromosome 2 | TCCAAATTCTCCACC |
| | | CTCACTTGCAGCCTG |
| SEQ ID | GI 207440658 NG_008647 Homo sapiens | TTCAGTCCACACTTC |
| NO: 1453 | GTP cyclohydrolase 1 (GCH1), | TAGTAGGTTGAGTTC |
| | RefSeqGene on chromosome 14 | AGCCCAAGATTAAGG |
| | | CTCTGGTCTGGAGTC |
| SEQ ID | GI 584613557 NG_033959 Homo sapiens | AGCTGGCCTGTTACT |
| NO: 1454 | poly(ADP-ribose) polymerase 2 | CTTAGGGAACTATCT |
| | (PARP2), RefSeqGene on chromosome 14 | TATGTGTGGCATTTC |
| | | CTTTGCAGTTGGGAA |
| SEQ ID | GI 1000232109 NG_046737 Homo sapiens | CAGAAGATTGGCTTT |
| NO: 1455 | protein phosphatase 1 regulatory | GGGTTTCTAGTGATG |
| | subunit 15B (PPP1R15B), RefSeqGene | CTCTGTTGTCTCCAC |
| | on chromosome 1 | CAGATGGCGTTATCT |
| SEQ ID | GI 974987499 NG_023044 Homo sapiens | GTGACCCGTTATGTT |
| NO: 1456 | radixin (RDX), RefSeqGene on chromosome 11 | TTAGCTTAGTGCATG |
| | | CACTAGGAGGTCACC |
| | | ATCAGTGTTTGACCT |
| SEQ ID | GI 6272556 AF123887 Homo sapiens | GCTGATATGTGCCTG |
| NO: 1457 | EROIL (EROIL) mRNA, | TTTCTGGACAATGGA |
| | | GGCGAAAGAGTGGAA |
| | | TTTCATTCAAAGGCA |
| SEQ ID | GI 167614499 NM_002286 Homo sapiens | CACCTACAGAGATGG |
| NO: 1458 | lymphocyte activating 3 (LAG3), mRNA | CTTCAACGTCTCCAT |
| | | CATGTATAACCTCAC |
| | | TGTTCTGGGTCTGGA |
| SEQ ID | GI 570359552 NM_001288718 Homo sapiens | TTGGCTTCACTAGAA |
| NO: 1459 | signal transducer and activator of | TCCCCAGTTCTTCCC |
| | transcription 5A (STAT5A), | CTCTCTACAGTTTTG |
| | transcript variant 1, mRNA | TCTCTGAGGTCACAA |
| SEQ ID | GI 4455117 AF125158 Homo sapiens | CACATGTGGTGAAGT |
| NO: 1460 | zinc finger DNA binding protein 99 | CATAGTTAAAGGAGC |
| | (ZNF281) mRNA, complete cds | CACTAGTGCAGAACC |
| | | TGGGTCATCAAACCA |
| SEQ ID | GI 224809231 NG_011436 Homo sapiens | ATCACGGCAAGCCTT |
| NO: 1461 | alpha 2-HS glycoprotein (AHSG), | CTTTTAGGGTGTCAC |
| | RefSeqGene on chromosome 3 | CTCATCCCTTTAAGA |
| | | GCTGTCATCAAATCA |
| SEQ ID | GI 300068920 NG_023233 Homo sapiens | ACTTGGTTTCTTTGC |
| NO: 1462 | bone morphogenetic protein 2 (BMP2), | TCAGAGCCGTGTCCC |
| | RefSeqGene on chromosome 20 | ATTTAGGAAAGTACT |
| | | AGGAGTTTGGGGTTC |
| SEQ ID | GI 648216408 NG_034146 Homo sapiens | ACACCATTCCTCATA |
| NO: 1463 | phosphoglucomutase 3 (PGM3), | GTCTACAGGAAATCA |
| | RefSeqGene on chromosome 6 | GGTGGGGAAAGCAAA |
| | | GTCAGGAAATGGCAT |
| SEQ ID | GI 353409895 NG_030365 Homo sapiens | CTGCCAACACACTGT |
| NO: 1464 | POU class 2 homeobox 2 (POU2F2), | GTCATTTTGCCCAAG |
| | RefSeqGene on chromosome 19 | TTGCTTTCTGTCTCT |
| | | GGACTTCCTTTTACA |
| SEQ ID | GI 212549771 NG_008990 Homo sapiens | CTATGAATGTGAAGT |
| NO: 1465 | TNF superfamily member 11 (TNFSF11), | GAGCTTGGCCAACCT |
| | RefSeqGene on chromosome 13 | GCTCTTCCTCCAGAG |
| | | TGTTTCATATCAGCA |
| SEQ ID | GI 807201065 NM_001008397 Homo sapiens | TGTTAGCGAAGAAAA |
| NO: 1466 | glutathione peroxidase 8 (putative) | CAGAAGCCACCAACA |
| | (GPX8), transcript variant 1, mRNA | AGCCTATCTGTCCTT |
| | | TGCAATTTTGCTCCA |
| SEQ ID | GI 802084027 NM_006236 Homo sapiens | AGAGAGAGAGAGTCC |
| NO: 1467 | POU class 3 homeobox 3 (POU3F3), mRNA | CCTTTCCTTTCACTT |
| | | TCTCCCTCCAAAACA |
| | | GCTGCCTAAAGAGAT |
| SEQ ID | GI 24756896 L47234 Homo sapiens | CAGGTGAAAAAGATG |
| NO: 1468 | ERCC2 (ERCC2) and kinesin light chain | AGGCACAGAGAGGCT |
| | (KLC2) genes, complete cds, complete | GAGTAACTTGTCTTA |
| | sequence | GGTCACACAGCCAAG |
| SEQ ID | GI 117606495 EF064722 Homo sapiens | CCAATCCCCTTTTCA |
| NO: 1469 | interleukin 6 signal transducer (gpl30 | TCTCCCCTGAAATTC |
| | , oncostatin M receptor) (II6ST) gene, | TATTCGCTCCGCACT |
| | complete cds | TGTCTTCATTCTCGA |
| SEQ ID | GI 166706778 EU332848 Homo sapiens | TGTCTTCACTCCTGG |
| NO: 1470 | integrin, beta 5 (ITGB5) gene, | GAGGAGTCCATTTTT |
| | complete cds | GTTAATTTTCTCAGT |
| | | GACTGGGAAGGGCTG |
| SEQ ID | GI 33867482 AY368173 Homo sapiens | AAGGGAAAGGGCGTT |
| NO: 1471 | microsomal glutathione | CCTCAACTGAGAAGT |
| | S-transferase 1 (MGST1) gene | GAAGATTCTTCTCTG |
| | , complete cds | CTAGATAGTACGGGG |
| SEQ ID | GI 219521814 NG_009215 Homo sapiens | TTTCTCCATCATGAA |
| NO: 1472 | bone morphogenetic protein 4 (BMP4), | GGTGTAGATATGAGC |
| | RefSeqGene on chromosome 14 | GGTAGTATTGCTGTT |
| | | GCTGGTGGTGTGTGC |
| SEQ ID | GI 1146072968 NG_011674 Homo sapiens | TGACTCACAGGTCCT |
| NO: 1473 | glycine amidinotransferase (GATM), | GACAATTTGACTCTG |
| | RefSeqGene on chromosome 15 | GGGAAATACAGGTCC |
| | | TGACTCACAGATCAT |
| SEQ ID | GI 292658838 NG_016860 Homo sapiens | TGGAAGTTGCAAATT |
| NO: 1474 | pyruvate dehydrogenase (lipoamide | CCTAATTTGGCAGCC |
| | ) beta (PDHB), RefSeqGene on | TGCAGCTGTGATCCA |
| | chromosome 3 | TAGAAGGGAATGTTT |
| SEQ ID | GI 194018566 NG_008183 Homo sapiens | CAAAGGATTAGTCAT |
| NO: 1475 | pancreatic and duodenal homeobox 1 | AGGAAATGGTGGTGG |
| | (PDX1), RefSeqGene on chromosome 13 | GAGGAGGAGGTGGAA |
| | | GGCAAAGAAAAGGAA |
| SEQ ID | GI 181979 M29366 Human epidermal | TACGTAGCTTAGAGG |
| NO: 1476 | growth factor receptor (ERBB3) | CTACAGACTCTGCCT |
| | mRNA, complete cds | TTGATAACCCTGATT |
| | | ACTGGCATAGCAGGC |
| SEQ ID | GI 189491779 NM_006507 Homo sapiens | AGACCATCTCCTCCC |
| NO: 1477 | regenerating family member 1 | TAATGAGTTTGCATC |
| | beta (REGIB), mRNA | GCTGATCTTCAGTAC |
| | | CTTCACCTGTCTCAG |
| SEQ ID | GI 528078360 NM_003955 Homo sapiens | AGGGGATTCTACTCT |
| NO: 1478 | suppressor of cytokine signaling 3 | GTGCCTCCTGACTAT |
| | (SOCS3), mRNA | GTCTGGCTAAGAGAT |
| | | TCGCCTTAAATGCTC |
| SEQ ID | GI 514388123 NG_029053 Homo sapiens | TGAGAACCAGAACAC |
| NO: 1479 | mitogen-activated protein kinase 8 | CGAATGTAGTTTCAG |
| | (MAPK8), RefSeqGene on chromosome 10 | TCCAAAGGCCAGTAG |
| | | GCTCAAGATCTAGGA |
| SEQ ID | GI 342672042 NG_029626 Homo sapiens | GCCTTAGACTGACAG |
| NO: 1480 | synaptosome associated protein 25 | GGACACACTTTGTTC |
| | (SNAP25), RefSeqGene on chromosome 20 | TACTACCACTCATGG |
| | | ACTGTCTCTAGCCAC |
| SEQ ID | GI 1150561155 NG_052944 Homo sapiens | GAACGTGCTACCGGC |
| NO: 1481 | TNF superfamily member 12 (TNFSF12), | ACAGTGAGTGTTTTA |
| | RefSeqGene on chromosome 17 | AGCTGAAGGAATTTG |
| | | AGAAAACCGCAGAAG |
| SEQ ID | GI 95147553 NM_003956 Homo sapiens | GACCTGCATCACTCT |
| NO: 1482 | cholesterol 25-hydroxylase | CACTTTAACTGCAAC |
| | (CH25H), mRNA | TTCGCTCCGTACTTT |
| | | ACACACTGGGACAAA |
| SEQ ID | GI 169790828 NM_002755 Homo sapiens | CCATGGCAATTTTTG |
| NO: 1483 | mitogen-activated protein kinase | AGTTGTTGGATTACA |
| | kinase 1 (MAP2K1), mRNA | TAGTCAACGAGCCTC |
| | | CTCCAAAACTGCCCA |
| SEQ ID | GI 359279909 NM_020663 Homo sapiens | GGGGCAGACCCTTTT |
| NO: 1484 | ras homolog family member J (RHOJ), mRNA | CATAACTCCCTCAAG |
| | | TGTGTGTTACCTTTC |
| | | TTTACCAGCATGGTA |
| SEQ ID | GI 1036032346 AH001409 Homo sapiens | GAGAAGGTCGGACCA |
| NO: 1485 | alcohol dehydrogenase 6 (ADH6) | GCCTTCTGATCTACA |
| | gene, complete cds | GTCGCCTGTGTACCT |
| | | TTGTACTTTCTACAG |
| SEQ ID | GI 219521817 NG_009217 Homo sapiens | TTCCCAGGTACATTC |
| NO: 1486 | cathepsin B (CTSB), RefSeqGene | AAGCTCACAATACCT |
| | on chromosome 8 | TTCCAGCTGCTCCCT |
| | | GATTAGAAAACTGCA |
| SEQ ID | GI 345478700 NG_029900 Homo sapiens | AGGGATATCAGGATG |
| NO: 1487 | p21 | GGGTTTCTCGTGGGA |
| | (RAC1) activated kinase 1 | GGTTTGGTGATCCTG |
| | (PAK1), RefSeqGene on chromosome 11 | ATAGTTAAGTTCCAT |
| SEQ ID | GI 1041818081 NG_051000 Homo sapiens | TGGGATTGTACCTAC |
| NO: 1488 | pentraxin 3 | TGAAATACAGTAGGT |
| | (PTX3), RefSeqGene on chromosome 3 | AACCCTGTGAGGGTC |
| | | CTGGCTTTCATGAGG |
| SEQ ID | GI 109637772 NM_015247 Homo sapiens | AATGCATTAACCAGC |
| NO: 1489 | CYLD lysine 63 deubiquitinase | AAGTGTGGCCAAGGA |
| | (CYLD), transcript variant 1, mRNA | TAATGAAAAAGTGGG |
| | | AAAGGAAGGTCCTCC |
| SEQ ID | GI 256017191 NM_002977 Homo sapiens | TTATGGCTACACGAG |
| NO: 1490 | sodium voltage-gated channel alpha subunit 9 | CTTTGACACTTTCAG |
| | (SCN9A), mRNA | CTGGGCCTTCTTAGC |
| | | CTTGTTTAGGCTAAT |
| SEQ ID | GI 300068920 NG_023233 Homo sapiens | CTCAGATTGAACACT |
| NO: 1491 | bone morphogenetic protein 2 | TACCAGAGTGTCAGG |
| | (BMP2), RefSeqGene on chromosome 20 | GCTTCTGTACCCTGG |
| | | GTTAGAATCAGACCA |
| SEQ ID | GI 383209671 NG_032573 Homo sapiens | TTTCTGTGGTGTTTC |
| NO: 1492 | DnaJ heat shock protein family | CTCCCTTGTATTTTG |
| | (Hsp40) member B6 | TGGTGTTGGTCCCCC |
| | (DNAJB6), RefSeqGene on chromosome | TAACAGGTCTTTGTA |
| SEQ ID | GI 340523111 NG_029470 Homo sapiens | TGCACCAAGAACTCT |
| NO: 1493 | enolase 1 | GACCCATGGTTTCTT |
| | (ENO1), RefSeqGene on chromosome 1 | GCCCCAAAGCAGAAA |
| | | AAAAGTAACTGATGT |
| SEQ ID | GI 347800632 NG_030032 Homo sapiens | ATTTCGCCTATAGCA |
| NO: 1494 | HSPB1 associated protein 1 | TGCTGAACTGGAGTT |
| | (HSPBAP1), RefSeqGene on chromosome 3 | GCAGCAGATGTCAAG |
| | | GTAGAATCCATGGAG |
| SEQ ID | GI 1099522105 NG_052009 Homo sapiens | TCTTACTCATCATCT |
| NO: 1495 | salt inducible kinase 1 | TATGCTGTTACTGTC |
| | (SIK1), RefSeqGene on chromosome 21 | TCCGCAACTGGAACC |
| | | AACGGTCCTCGAGAG |
| SEQ ID | GI 345842418 NG_029946 Homo sapiens | GAAATTTTAGTTGGC |
| NO: 1496 | SMAD family member 2 | TTCTCCTTTGGCAAG |
| | (SMAD2), RefSeqGene on chromosome 18 | CTCAGTCCTTTGTCT |
| | | GTGTCCTGACTTGGC |
| SEQ ID | GI 388596695 NM_001227 Homo sapiens | GAAAATGGAGCCATG |
| NO: 1497 | caspase 7 | ACAAGAACAAAGCCA |
| | (CASP7), transcript variant a, mRNA | CTGACTGAGATGGAG |
| | | TGAGCTGAGACAGAT |
| SEQ ID | GI 306140488 NM_030956 Homo sapiens | TCCATTATGCTTCTC |
| NO: 1498 | toll like receptor 10 | CTCTCTGAGAATCCT |
| | (TLR10), transcript variant 1, mRNA | GACTTACCTCAACAA |
| | | CGGAGACATGGCACA |
| SEQ ID | GI 52854080 AY764389 Homo sapiens | TTCTGAGGCCTTCAC |
| NO: 1499 | baculoviral lAP repeat-containing 3 | TTTGGGTTTTCTGAG |
| | (BIRC3) gene, complete cds | CCCCAACATCTGCTA |
| | | GTGTTGTAAAGAGAA |
| SEQ ID | GI 350606382 NG_030335 Homo sapiens | GTTGTCTGAGTTTGT |
| NO: 1500 | SEL1L ERAD E3 ligase adaptor subunit | CTCACTACCACCCCA |
| | (SELIL), RefSeqGene on chromosome 14 | TACCCGACAGACACC |
| | | ATCTCAACTGTCTTA |
| SEQ ID | GI 325651826 NM_001443 Homo sapiens | TGACCGAACTCAACG |
| NO: 1501 | fatty acid binding protein 1 | GCGACATAATCACCA |
| | (FABP1), mRNA | ATACCATGACATTGG |
| | | GTGACATTGTCTTCA |
| SEQ ID | GI 393537030 NM_000151 Homo sapiens | TGCTTTTGTATGTTT |
| NO: 1502 | glucose-6-phosphatase catalytic subunit | CAATTAGGCTCTGAA |
| | (G6PC), transcript variant 1, mRNA | ATCTTGGGCAAAATG |
| | | ACAAGGGGAGGGCCA |
| SEQ ID | GI 1049017896 NM_002192 Homo sapiens | ATTCAGCAAGGCCCT |
| NO: 1503 | inhibin beta A subunit | CTTTCATTGTACAGG |
| | (INHBA), mRNA | GATCAAATTTCCTCC |
| | | TCTTTTTTGTGCCCC |
| SEQ ID | GI 193211454 NM_020651 Homo sapiens | ATCCTAAGGAGATTG |
| NO: 1504 | pel lino E3 ubiquitin protein ligase 1 | CCACAGTGAGACTTA |
| | (PELI1), mRNA | AGGAAATGTTTGGTT |
| | | GGCAGATGAGCACCA |
| SEQ ID | GI 50234968 AY665769 Homo sapiens | GGGGCAAAGGTAAAA |
| NO: 1505 | chemokine-like factor | CCAAGGAGACCAATT |
| | (CKLF) gene, complete cds | GCAGTAATCTGGGCA |
| | | AGAAATGATGATGGT |
| SEQ ID | GI 238018114 NG_012216 Homo sapiens | TGGCAACCAAGTTTC |
| NO: 1506 | B-cell CLL/lymphoma 10 | CAACATGTGAACTTT |
| | (BCL10), RefSeqGene on chromosome 1 | TGGCGGATACATTCG |
| | | TACCACAGCTAATGG |
| SEQ ID | GI 1025812269 NG_047054 Homo sapiens | AACAGGAAGGCAATC |
| NO: 1507 | glutathione peroxidase 5 | TCTGTTTTTTAAAAA |
| | (GPX5), RefSeqGene on chromosome 6 | GGCCTAGAGGAGGTA |
| | | CCAGTTGGCTGAGCT |
| SEQ ID | GI 336285236 NG_029146 Homo sapiens | AGACGATGTGAAATC |
| NO: 1508 | MCL1, BCL2 family apoptosis regulator | GTTGTCTCGAGTGAT |
| | (MCL1), RefSeqGene on chromosome 1 | GATCCATGTTTTCAG |
| | | CGACGGCGTAACAAA |
| SEQ ID | GI 374349248 NG_032045 Homo sapiens | GGGACCTGAGGACTG |
| NO: 1509 | phospholipase A2 group V | GGAAAGTGAAGTGTT |
| | (PLA2G5), RefSeqGene on chromosome 1 | TTGCTTGAGACCACA |
| | | CAGGTAATAAGGAAG |
| SEQ ID | GI 221316601 NM_001143935 Homo sapiens | CATGAAGGATGTTTG |
| NO: 1510 | carnitine O-octanoyltransferase | GTCACCCCGCCAGAG |
| | (CROT), transcript variant 1, mRNA | CTTCTCAGACAACTG |
| | | ACATATATCCACAAG |
| SEQ ID | GI 27368251 AY196903 Homo sapiens | TGCTTCATCAAAACC |
| NO: 1511 | interleukin 1 receptor antagonist | CCTTTACGTGGGGCT |
| | (ILIRN) gene, complete cds | TAGACACTCCTGTTG |
| | | TCTCTAGTGTCTAGT |
| SEQ ID | GI 237649059 NG_012020 Homo sapiens | ACTGATCCAGCAGTC |
| NO: 1512 | adrenoceptor alpha 2A | AAATGATGAACATGG |
| | (ADRA2A), RefSeqGene on chromosome 10 | TAGGTGGTGAATAAG |
| | | GCAGCTCCTTACAGC |
| SEQ ID | GI 374349244 NG_032042 Homo sapiens | GTCACTGCCTTTCAC |
| NO: 1513 | annexin A5 | AATCCTTCCATCCTT |
| | (ANXA5), RefSeqGene on chromosome 4 | CAATACTTGTGGGTG |
| | | TCACCTTCTCCATGA |
| SEQ ID | GI 1122782504 NG_013302 Homo sapiens | TTCTCTTCCCTTTTG |
| NO: 1514 | catenin beta 1 | GAGGGAGCGTTGTCT |
| | (CTNNB1), RefSeqGene on chromosome 3 | CCTACTTTGTATCTT |
| | | CCAGACATCTGTGGT |
| SEQ ID | GI 189458808 NG_007982 Homo sapiens | CTGCCATTAAATTCC |
| NO: 1515 | cytochrome P450 family 19 | TGTAAAGGAACTTCT |
| | subfamily A member 1 | CACTGAGGGTGCTCA |
| | (CYP19A1), RefSeqGene on chromosome | TTCTGTGTGTGGGGA |
| SEQ ID | GI 335057570 NG_029067 Homo sapiens | TCAGAGACTTCCTAA |
| NO: 1516 | fibroblast growth factor 2 | CAGAGGTACTAGACT |
| | (FGF2), RefSeqGene on chromosome 4 | GGCCTCCTGTTGACA |
| | | CTGAGAGGTTCAGTT |
| SEQ ID | GI 432134281 NG_033037 Homo sapiens | TATAGAGTTCACACA |
| NO: 1517 | ancient ubiquitous protein 1 | TGCTCAGTGTGGTAG |
| | (AUP1); and HtrA serine peptidase 2 | CTGGAGCCTGTTTTC |
| | (HTRA2), RefSeqGene on c [symbol] | CATAGGTTCCTGACT |
| SEQ ID | GI 942429606 NG_008852 Homo sapiens | ACCCGACAACTGTCC |
| NO: 1518 | insulin receptor | AGAGAGAGTGTAAGT |
| | (INSR), RefSeqGene on chromosome 19 | GTAGAAAGGGTTTAA |
| | | GGTGTGTGAGGTGTT |
| SEQ ID | GI 359751452 NG_031884 Homo sapiens | CTTAGGTTGGGCTAA |
| NO: 1519 | mitogen-activated protein | ACATTTTGGATTTTA |
| | kinase kinase kinase 1 | GTCTAAGCCCGGGGG |
| | (MAP3K1), RefSeqGene on chromosome 5 | GAACCACTAGAGCAT |
| SEQ ID | GI 584277161 NG_008225 Homo sapiens | AAGCCAGTAACGTGA |
| NO: 1520 | POU class 1 homeobox 1 | GATGATGTTGTCAGC |
| | (POU1F1), RefSeqGene on chromosome 3 | TAACCACATGCTGCA |
| | | AAGATCAATTTGCCC |
| SEQ ID | GI 746815960 NM_004929 Homo sapiens | AGGGAAGCTGTACCG |
| NO: 1521 | calbindin 1 | AACGGATCTTGCTCT |
| | (CALB1), mRNA | TATTCTCTGTGCTGG |
| | | GGATAACTAGAGTTG |
| SEQ ID | GI 966751447 NM_002581 Homo sapiens | AGCCCTTCATGGGAG |
| NO: 1522 | pappalysin 1 | ACAATTATTGTGATG |
| | (PAPPA), mRNA | CCATCAACAACCGAG |
| | | CCTTTTGCAACTATG |
| SEQ ID | GI 992699 U33447 Human putative | ATGCTGTTCGCCTCC |
| NO: 1523 | G-protein-coupled receptor | TTCTACCTTCTGGAT |
| | (GPR17) gene, complete cds | TTTATCCTGGCTTTA |
| | | GTTGGCAATACCCTG |
| SEQ ID | GI 350276269 NG_030323 Homo sapiens | CCAGTTGGGATCTTG |
| NO: 1524 | sialic acid binding ig like lectin 11 | GTATGAGAACTGACC |
| | (SIGLEC11), RefSeqGene on chromosome 19 | TTGAGTGTATGCCTG |
| | | AGCATTCACTGCATC |
| SEQ ID | GI 959241467 NG_046314 Homo sapiens | GAGCTATGGAAGATG |
| NO: 1525 | signal transducer and | GCACACATTCCCTTT |
| | activator of transcription 2 | CCTACCTCTTCTCCC |
| | (STAT2), RefSeqGene on chromosome 12 | TCTCCCATTACAGAA |
| SEQ ID | GI 229577394 NG_011993 Homo sapiens | AAAAAAAAAAAACAA |
| NO: 1526 | thymocyte selection associated | AGGAAGGTGAGCCCC |
| | high mobility group box | TCCCTTCATGGAGAC |
| | (TOX), RefSeqGene on chromosome [symbol] | TTCTTGGAAGCACCA |
| SEQ ID | GI 112293258 NM_001736 Homo sapiens | TGTTACCTTAGCTAA |
| NO: 1527 | complement C5a receptor 1 | CTAACTCTCCTCCAT |
| | (C5AR1), mRNA | GTTGCCTGTCTTTCC |
| | | CAGACTTGTCCCTCC |
| SEQ ID | GI 22538815 NM_005623 Homo sapiens | CCTGTCTGTAGTGTT |
| NO: 1528 | C-C motif chemokine ligand 8 | GTGGGGTCCTCCCAT |
| | (CCL8), mRNA | GGATCATCAAGGTGA |
| | | AACACTTTGGTATTC |
| SEQ ID | GI 747811824 NM_017594 Homo sapiens | CTGGTTGGACTTGGC |
| NO: 1529 | DIRAS family GTPase 2 | TTCCTGAAAACTCCC |
| | (DIRAS2), mRNA | ACTGATAGTGCCTGT |
| | | TAGATCTCCTGTTTG |
| SEQ ID | GI 169791020 NM_005328 Homo sapiens | ACCTTAGTTCCTCTA |
| NO: 1530 | hyaluronan synthase 2 | GGGGCTGTACAGTAT |
| | (HAS2), mRNA | TGTGGCATCAGATAA |
| | | TGCCACCAAAGGAGA |
| SEQ ID | GI 2304970 U82828 Homo sapiens | TAAGTATCAAGGAAT |
| NO: 1531 | ataxia telangiectasia | TGAGGCCTCCTGCCA |
| | (ATM) gene, complete cds | ACAACTGTTCAAGTG |
| | | TACCATCTTGGAGGC |
| SEQ ID | GI 31559177 AY309922 Homo sapiens | CCTGGTTTGTGAATG |
| NO: 1532 | BH3 interacting domain death agonist | AGCCTAGCTGATTCT |
| | (BID) gene, complete cds | GGCTTTTTCTCCTTT |
| | | CTTGCTCTAGGGGAT |
| SEQ ID | GI 20160210 AY094608 Homo sapiens | CTCTGCCTACATCTG |
| NO: 1533 | cyclin-dependent kinase inhibitor 2C | ACGTCCGGAGTCATT |
| | (CDKN2C) gene, complete cds | AACCAGGAATGTATG |
| | | TGTGTCTGTGTGTCT |
| SEQ ID | GI 662840 L39370 Homo sapiens | TCAAACGGGTCATTG |
| NO: 1534 | heat shock protein 27 | CCATTAATAGAGACC |
| | (HSPB1) gene, complete cds | TCAAACACCGCCTGC |
| | | TAAAAATACCCGACT |
| SEQ ID | GI 82583661 DQ297144 Homo sapiens | GTTCCCAAAGCTCTG |
| NO: 1535 | metallothionein 3 | GAAAATTGTGGAGGG |
| | (growth inhibitory factor | TCAGGAAGAGATCAG |
| | (neurotrophic)) | TTGGACTGAAGACAG |
| | (MT3) gene, complete cds | |
| SEQ ID | GI 1049010853 AH002961 Homo sapiens | TACGCCAGTACCGAA |
| NO: 1536 | N-ras oncogene | TGAAAAAACTCAACA |
| | (NRAS) gene, complete cds | GCAGTGATGATGGGA |
| | | CTCAGGGTTGTATGG |
| SEQ ID | GI 238776831 NG_012261 Homo sapiens | ATGTCCAGTGAAGCA |
| NO: 1537 | aldehyde dehydrogenase 8 family member A1 | GGTAGAACTACCTAG |
| | (ALDH8A1), RefSeqGene on chromosome 6 | AAGTAGGTTCTCAGC |
| | | CACTAGGCCCAGATA |
| SEQ ID | GI 1025608652 NG_047034 Homo sapiens | TTCTAGATCAGGCCC |
| NO: 1538 | autocrine motility factor receptor | CCATTGCCTGTTTCT |
| | (AMFR), RefSeqGene on chromosome 16 | TGAAGAACTTTCTAC |
| | | AGCAGCCAAGAGATG |
| SEQ ID | GI 336088682 NG_029094 Homo sapiens | TCCATAGGCTTCTCC |
| NO: 1539 | apoptotic peptidase activating factor 1 | TAATTCTAGGTGCAG |
| | (APAF1), RefSeqGene on chromosome 12 | CAGTGCATGTGACAC |
| | | TGAAGAACTTCCCTA |
| SEQ ID | GI 283837772 NG_016339 Homo sapiens | ACCTCCATTTTTCTC |
| NO: 1540 | A-Raf proto-oncogene, | CCCGCAACACCATAC |
| | serine/threonine kinase | CTTCCTTCTCCTTTT |
| | (ARAF), RefSeqGene on chromosome X | GCTATGACAATGTCT |
| SEQ ID | GI 343098512 NG_029658 Homo sapiens | TTCCTTCTTACCTCT |
| NO: 1541 | BTB domain and CNC homolog 1 | CTGGCTGTCTCTCCT |
| | (BACH1), RefSeqGene on chromosome 21 | GCCTTCTCTCTCTCT |
| | | CTCAACTGTCTCAAA |
| SEQ ID | GI 238018065 NG_012195 Homo sapiens | GGTTCAGAAGGAGAA |
| NO: 1542 | fatty acid amide hydrolase | AACAAAACAGATGGA |
| | (FAAH), RefSeqGene on chromosome 1 | GGAGGGGCAATGCCT |
| | | CCTAAGTGATTGGTA |
| SEQ ID | GI 1139349906 NG_052802 Homo sapiens | TTTACCCTGTCTCCT |
| NO: 1543 | NLR family pyrin domain containing 4 | TTCTTGAGGCTGATC |
| | (NLRP4), RefSeqGene on chromosome 19 | GATCACAGCCAGGCC |
| | | TCTCCATTCTATTTA |
| SEQ ID | GI 618857519 NG_034119 Homo sapiens | CGAGGTGTCTTGAAG |
| NO: 1544 | nuclear receptor | CAGAAATGTGACTTG |
| | subfamily 2 group F member 1 | GAACTGGACAGACGT |
| | (NR2F1), RefSeqGene on chromosome 5 | TTTCTCAGGAAAGGT |
| SEQ ID | GI 210032246 NG_008862 Homo sapiens | CCTTTGGAACGGCAT |
| NO: 1545 | phosphoglycerate kinase 1 | TAAGCAATCACTAAT |
| | (PGK1), RefSeqGene on chromosome X | GGATGCCCCTGGGAA |
| | | GTCGGTATAACCTTA |
| SEQ ID | GI 256600243 NG_012682 Homo sapiens | TGTTACTGCTGATGG |
| NO: 1546 | versican | ATTCCCAACAGTTTC |
| | (VCAN), RefSeqGene on chromosome 5 | AGTGATGCTGCCTCT |
| | | TCATTCAGAGCAGAA |
| SEQ ID | GI 161377466 NM_003914 Homo sapiens | AGACCCTGTATCTGG |
| NO: 1547 | cyclin A1 | CTGTCAACTTCCTGG |
| | (CCNA1), transcript variant 1, mRNA | ACAGGTTCCTTTCAT |
| | | GTATGTCTGTTCTGA |
| SEQ ID | GI 1135449812 NG_052668 Homo sapiens | TGCAAGAAGATGGTA |
| NO: 1548 | acyl-CoA oxidase 2 | AGATGATCCTTCTCT |
| | (ACOX2), RefSeqGene on chromosome 3 | GGAGAATCTGACCAG |
| | | CCCAAGGAGAAGGAG |
| SEQ ID | GI 255958254 NG_012690 Homo sapiens | AGGCTCTGGTAATGG |
| NO: 1549 | flavin containing monooxygenase 3 | CGACCATTTTCCTGG |
| | (FMO3), RefSeqGene on chromosome 1 | TAACTTAGGGTTATT |
| | | TGTAACTCCAGCAGC |
| SEQ ID | GI 257467500 NG_012841 Homo sapiens | CAGTTTCACCAGTTT |
| NO: 1550 | interleukin 13 receptor subunit alpha 1 | CTCCTCAGAGTGCAG |
| | (IL13RA1), RefSeqGene on chromosome X | CTTTGCCCTGGAAGG |
| | | GATTAAGGATTAGTT |
| SEQ ID | GI 1135449810 NG_052673 Homo sapiens | ACAGCAGTGTATGAA |
| NO: 1551 | 0-6-methylguanine-DNA methyltransferase | ATTGTTCCCATCAGC |
| | (MGMT), RefSeqGene on chromosome 10 | TCCAGCGCGTGAAAG |
| | | ACAATACGAACAGTA |
| SEQ ID | GI 648216408 NG_034146 Homo sapiens | TTCTGGGTTGTGCTA |
| NO: 1552 | phosphoglucomutase 3 | AACAACATAGGGAGG |
| | (PGM3), RefSeqGene on chromosome 6 | AAAGCTGGACCTGGA |
| | | GTCAAAGGAATTGAG |
| SEQ ID | GI 1027250665 NG_047132 Homo sapiens | CTCTCCTCACTTTTT |
| NO: 1553 | peroxisome proliferator-activated receptor | CCTCCAGCATCTCTT |
| | gamma, coactivator-related 1 | TTGGGAAGGCATGCT |
| | (PPRC1), | CCTGTAATCTGACAC |
| | RefSeq | |
| SEQ ID | GI 694879461 NG_031891 Homo sapiens | AACCTCCAAAAATGC |
| NO: 1554 | sodium voltage-gated channel | CAGTGAGAGAAGGCA |
| | alpha subunit 10 | TAGAATAAAGCCAAG |
| | (SCN10A), RefSeqGene on chromosome 3 | AGTGTCAGAGGGCTC |
| SEQ ID | GI 1050193335 NG_027721 Homo sapiens | TGAATGAAACTGCCC |
| NO: 1555 | transforming growth factor beta 2 | CTTGGCCTCTTCCCT |
| | (TGFB2), RefSeqGene on chromosome 1 | ACCATCTCTAAATTG |
| | | CCTTCTTTTCCTTCA |
| SEQ ID | GI 22538799 NM_005408 Homo sapiens | TCACACCCTGAAGAC |
| NO: 1556 | C-C motif chemokine ligand 13 | TTGAACTCTGCTACC |
| | (CCL13), mRNA | CCTACTGAAATCAAG |
| | | CTGGAGTACGTGAAA |
| SEQ ID | GI 325652102 NM_002811 Homo sapiens | CTACGTGGAAGTGAA |
| NO: 1557 | proteasome 26S subunit, non-ATPase 7 | TGGAGACTGATCTCA |
| | (PSMD7), mRNA | AATCTGAACTGCAGC |
| | | TTTCGCTGCTGTGAG |
| SEQ ID | GI 1049010711 AH003036 Homo sapiens | TGTGACCTGGCATGC |
| NO: 1558 | Bruton agammaglobulinemia | CTAGCTACTTTTTCT |
| | (BTK) gene, complete cds | AACTTGCCTAAAGGC |
| | | ACTCAATATGGACGG |
| SEQ ID | GI 28372408 AY228337 Homo sapiens | AGCTCTTCTGTTTGT |
| NO: 1559 | TNF receptor-associated factor 6 | AACACTCTTGCCACA |
| | (TRAF6) gene, complete cds | GCTAACCCCTTAACT |
| | | CTTCCACTTTGGCTC |
| SEQ ID | GI 28372408 AY228337 Homo sapiens | GAGAACACCCAGTCA |
| NO: 1560 | TNF receptor-associated factor 6 | CACATGAGAATGTTG |
| | (TRAF6) gene, complete cds | GCCCAGGCTGTTCAT |
| | | AGTTTGAGCGTTATA |
| SEQ ID | GI 1003701615 NG_008076 Homo sapiens | GTGTGGACCAGCTTT |
| NO: 1561 | growth differentiation factor 5 | GTCATTAACTTGCTG |
| | (GDF5), RefSeqGene on chromosome 20 | TGTGACCTTAGTCAA |
| | | GTCACTCCCCATCTC |
| SEQ ID | GI 974987490 NG_016453 Homo sapiens | CCCTTTCATCATCTT |
| NO: 1562 | transient receptor potential | ATTCTTCAGGGACAG |
| | cation channel subfamily M member 1 | CCATCAGGGTGGGAA |
| | (TRPM1), RefSeqGene or | TTTCAGACCATAGGC |
| SEQ ID | GI 440918690 NM_001272072 Homo sapiens | CGTGGTCTTTGAGCA |
| NO: 1563 | amine oxidase, copper containing 1 | GTTTCTTCACAACAA |
| | (AOC1), transcript variant 1, mRNA | CGAGAACATTGAAAA |
| | | TGAGGACCTGGTGGC |
| SEQ ID | GI 284172478 NM_052946 Homo sapiens | AACGAATGCTTAAAA |
| NO: 1564 | nitric oxide synthase trafficking | CGTACTCCAGCACCT |
| | (NOSTRIN), transcript variant 1, mRNA | CCTCCTTCTCTGATG |
| | | CAAAGAGCCAGAAAG |
| SEQ ID | GI 227499618 NM_003645 Homo sapiens | AAGCGGATTGAAGGC |
| NO: 1565 | solute carrier family 27 member 2 | AGATGATGTCATCTA |
| | (SLC27A2), transcript variant 1, mRNA | TATCACTCTGCCCTT |
| | | TTACCACAGTGCTGC |
| SEQ ID | GI 117606551 EF064750 Homo sapiens | AAGTTGAGGCTAGGA |
| NO: 1566 | CD80 molecule | TTCCTGCACTCAAAG |
| | (CD80) gene, complete cds | AGGTCTGCATATGTT |
| | | AGTTGCGGAAATGCA |
| SEQ ID | GI 27501923 AY204752 Homo sapiens | CATAATGTCCAGAAG |
| NO: 1567 | excision repair cross-complementing | AGAAGGGCTGTTCAC |
| | rodent repair deficiency, | CAGCATGTGCACAAA |
| | complementation group 6 | GTGATCTCAGGAGAG |
| | (ERCC | |
| SEQ ID | GI 163954923 NG_007095 Homo sapiens | GGAGCAGCCTCTCCT |
| NO: 1568 | aldehyde dehydrogenase 3 family member A2 | TGAATTGTTTTGTGA |
| | (ALDH3A2), RefSeqGene on chromosome 17 | TTTGAGTAAAACGGG |
| | | ACTCCCCCTGTTCTA |
| SEQ ID | GI 238018080 NG_012203 Homo sapiens | GTAGTCCTGGTGAAG |
| NO: 1569 | phospholipase A2 group IVA | AGAACAGCCTATCTG |
| | (PLA2G4A), RefSeqGene on chromosome 1 | AAGGCACTGGACTAG |
| | | AAAGGACAGAGCATG |
| SEQ ID | GI 254039651 NG_012413 Homo sapiens | GAAGTTTTTTGCTGC |
| NO: 1570 | vimentin | GTAGACAGTTTTATC |
| | (VIM), RefSeqGene on chromosome 10 | CCCCTCACCCCAAGG |
| | | TCAATTGCACGAATT |
| SEQ ID | GI 161377466 NM_003914 Homo sapiens | CCTCAGCAAGCAATT |
| NO: 1571 | cyclin A1 | AGGGAGAAGTACAAG |
| | (CCNA1), transcript variant 1, mRNA | GCTTCAAAGTACCTG |
| | | TGTGTGTCCCTCATG |
| SEQ ID | GI 735367774 NM_000211 Homo sapiens | TCGACCTGTACTATC |
| NO: 1572 | integrin subunit beta 2 | TGATGGACCTCTCCT |
| | (ITGB2), transcript variant 1, mRNA | ACTCCATGCTTGATG |
| | | ACCTCAGGAATGTCA |
| SEQ ID | GI 393662586 NM_002754 Homo sapiens | CATTCCCCCTAAATC |
| NO: 1573 | mitogen-activated protein kinase 13 | CTCCTGAGCTTTTAG |
| | (MAPK13), transcript variant 1, mRNA | GTAAGAGGCCGATGA |
| | | TTTCACAATCGGCAG |
| SEQ ID | GI 281485607 NM_003226 Homo sapiens | TCCCGGCAAGCGCTT |
| NO: 1574 | trefoil factor 3 | CTGCTGAAAGTTCAT |
| | (TFF3), mRNA | ATCTGGAGCCTGATG |
| | | TCTTAACGAATAAAG |
| SEQ ID | GI 66394595 DQ068066 Homo sapiens | TGCCTAATCACAGTG |
| NO: 1575 | baculoviral lAP repeat-containing 2 | GTTGCTGTCAAGGAG |
| | (BIRC2) gene, complete cds | TATATACACTAGCTG |
| | | GCGAGACTAGTGTGC |
| SEQ ID | GI 117606535 EF064742 Homo sapiens | TTTCACTGAGCACCT |
| NO: 1576 | chemokine | ACTGTGGGCCAGGTC |
| | (C-X-C motif) ligand 16 | ATAGTGTTGATGTCT |
| | (CXCL16) gene, complete cds | TCATCTGATTCCCTA |
| SEQ ID | GI 5821735 AF155233 Homo sapiens | GTACCCTACCTTCTG |
| NO: 1577 | snail zinc finger protein | TCACTTATCAACCCC |
| | (SNAIl) gene, complete cds | TATGAGTGGGGGGTG |
| | | AATAGCCCCATTTTA |
| SEQ ID | GI 30039656 AY273786 Homo sapiens | TGCCACCAACAATTA |
| NO: 1578 | tumor necrosis factor, | TGGAGAAGTCTGCTA |
| | alpha-induced protein 2 | GGTGTCAGCCTCTGT |
| | (TNFAIP2) gene, complete cds | TCTAGTTACCAGGAT |
| SEQ ID | GI 834400736 NG_042182 Homo sapiens | TTCGAAAACAGTGCT |
| NO: 1579 | eomesodermin | CTCCTATTTCTGCCC |
| | (EOMES), RefSeqGene on chromosome 3 | TCTAGAAAGCCCCAA |
| | | AGTGCTAATCACTGC |
| SEQ ID | GI 225543208 NG_011640 Homo sapiens | TATGTTAACATGCAT |
| NO: 1580 | interleukin 6 | GGGAATTCCCTGGGC |
| | (IL6), RefSeqGene on chromosome 7 | ATCTTCTTGTGGTGT |
| | | GGAGTCTGACTTAGC |
| SEQ ID | GI 359338962 NG_031836 Homo sapiens | TGCTACAGGGGAGGT |
| NO: 1581 | Z-DNA binding protein 1 | TATTGTAGTACCGTA |
| | (ZBP1), RefSeqGene on chromosome 20 | TTTGTTCTGAGACAC |
| | | GCTACTTTCCCCCAC |
| SEQ ID | GI 55770831 NM_001802 Homo sapiens | AGCTATACTTCTGGA |
| NO: 1582 | cerebellar degeneration related protein 2 | GAAGTAGGCCTGGAG |
| | (CDR2), mRNA | TTACTACAGTATGGG |
| | | GGAAAAGGGTCGAGT |
| SEQ ID | GI 1135449812 NG_052668 Homo sapiens | TGTGATTTGCAGTTC |
| NO: 1583 | acyl-CoA oxidase 2 | AAGAGTTCACCTGGC |
| | (ACOX2), RefSeqGene on chromosome 3 | AGCTGGGAGAACAAA |
| | | TAAGAGGAACACTGA |
| SEQ ID | GI 696221409 NG_041768 Homo sapiens | TCACTTTGGTACCTT |
| NO: 1584 | CD24 molecule | CACTGCCTTCTCATG |
| | (CD24), RefSeqGene on chromosome 6 | ATTGGCAGTGAAGAA |
| | | CAAAGCTCCACTGAA |
| SEQ ID | GI 507834151 NG_008376 Homo sapiens | 2TCACAACAGTCACCT |
| NO: 1585 | cytochrome P450 family 2 | CCCTTCATATATGAC |
| | subfamily D member 6 | ACCCCAAAACGGAAG |
| | (CYP2D6), RefSeqGene on chromosome 2 | ACAAATCATGGCGTC |
| SEQ ID | GI 893579206 NG_007504 Homo sapiens | ATGCAGGGAGAGCCA |
| NO: 1586 | sonic hedgehog | GCCTGCACTATAAAG |
| | (SHH), RefSeqGene on chromosome 7 | TCCCTGGGGAAGAAA |
| | | AATTAAATAACAGCT |
| SEQ ID | GI 6272556 AF123887 Homo sapiens | CAGTGGATGAATCTC |
| NO: 1587 | EROIL | TGAGTGAGGAAACAC |
| | (EROIL) mRNA, | AGAAGGCTGTTCTTC |
| | | AGTGGACCAAGCATG |
| SEQ ID | GI 57790279 AY865620 Homo sapiens | GTGACAGTGTTCCAA |
| NO: 1588 | signal transducer and activator | GTGAACAAGGCCTGT |
| | of transcription 1, 91 kDa | GAGTGCTAGCCTTGG |
| | (STAT1) gene, complete cds | AACATCTATAGCATC |
| SEQ ID | GI 1025608662 NG_047031 Homo sapiens | TGACCCTTGGTTAGG |
| NO: 1589 | ATP citrate lyase | GCACTTGGTTTGGAG |
| | (ACLY), RefSeqGene on chromosome 17 | CAGGTACTGTACATG |
| | | GAACTTTGTGTAAAA |
| SEQ ID | GI 166795291 NG_007376 Homo sapiens | TGATCTTTGGTCTGC |
| NO: 1590 | amyloid beta precursor protein | CTTCCTTCTCCTTCT |
| | (APP), RefSeqGene on chromosome 21 | CCAAGTCAAACCAGT |
| | | CACTCTTTCCTGAGA |
| SEQ ID | GI 300116194 NG_023256 Homo sapiens | GTTTCTTGCTCTCTC |
| NO: 1591 | linker for activation of T-cells | CCCATCTGTGTGTGT |
| | family member 2 | CTCTGACAGTCTGTG |
| | (LAT2), RefSeqGene on chromosome 7 | GCTCTCTGTATCTTT |
| SEQ ID | GI 327180724 NG_028256 Homo sapiens | GCAGCCTCTTGTGAC |
| NO: 1592 | mitogen-activated protein kinase kinase 3 | CCATGTCAAACATTT |
| | (MAP2K3), RefSeqGene on chromosome 17 | ATTCTGCTTTCTGCA |
| | | TGGTCATGGAGTTCC |
| SEQ ID | GI 340523097 NG_029467 Homo sapiens | TTTGTTCTTCTTGTC |
| NO: 1593 | protein tyrosine kinase 2 | AGGCTTACCCTATGC |
| | (PTK2), RefSeqGene on chromosome 8 | TGCTATAGATGGCTG |
| | | CAACCCGTGTTCAAT |
| SEQ ID | GI 402232739 NM_024295 Homo sapiens | GCCTTCCTTTATCGC |
| NO: 1594 | derlin 1 | TTTCAGATTTGGAGG |
| | (DERL1), transcript variant 1, mRNA | CCAATCACTGCCACC |
| | | TTTTATTTCCCTGTG |
| SEQ ID | GI 1041817991 NM_000569 Homo sapiens | TGGGGTGGAAAAGAA |
| NO: 1595 | Fc fragment of IgG receptor Illa | AGTACAGAACAAACC |
| | (FCGR3A), transcript variant 1, mRNA | CTGTGTCACTGTCCC |
| | | AAGTTGCTAAGTGAA |
| SEQ ID | GI 153792589 NM_001017963 Homo sapiens | CAAGTCTGTGAAGGA |
| NO: 1596 | heat shock protein 90 alpha | TCTGGTCATCTTGCT |
| | family class A member 1 | TTATGAAACTGCGCT |
| | (HSP90AA1), transcript variant 1, n | CCTGTCTTCTGGCTT |
| SEQ ID | GI 38016923 NM_006253 Homo sapiens | TTCTGAAAGGAATGT |
| NO: 1597 | protein kinase AMP-activated | AGAACTTGACAGCAG |
| | non-catalytic subunit beta 1 | CCTTCTGAGTCTGGG |
| | (PRKAB1), mRNA | TCAGGAAGATGTCCT |
| SEQ ID | GI 54112083 AY771996 Homo sapiens | CTTTCATGGTCCCCT |
| NO: 1598 | interleukin 12 receptor, beta 1 | TACCAATCCCCTATT |
| | (IL12RB1) gene, complete cds | CGTGGGCACTTAGAT |
| | | TGCTTCTGGTTTCTC |
| SEQ ID | GI 20303097 AF503166 Homo sapiens | CAACAGAGATGGGAG |
| NO: 1599 | xeroderma pigmentosum, | CTGAGTGCTAGAGTA |
| | complementation group A | GGTGCAGAAGTGGTA |
| | (XPA) gene, complete cds | GGTCAGCTACAAATT |
| SEQ ID | GI 942429606 NG_008852 Homo sapiens | TGACAAATGAAATAG |
| NO: 1600 | insulin receptor | CTCAGATAGGCCTGT |
| | (INSR), RefSeqGene on chromosome 19 | CAGCTAGGGCTCCAA |
| | | CACAGGATTGCAAAG |
| SEQ ID | GI 215820636 NG_009079 Homo sapiens | TAAGATGAGACACAC |
| NO: 1601 | malonyl-CoA decarboxylase | CCAGCAAAGGCTGTC |
| | (MLYCD), RefSeqGene on chromosome 16 | CTCATACAGAACTAC |
| | | CTCCAGGTGTCTTTT |
| SEQ ID | GI 195234781 NG_008319 Homo sapiens | GGTCGGGGAAAAGTG |
| NO: 1602 | pyruvate carboxylase | GAGAGACAAATAGAA |
| | (PC), RefSeqGene on chromosome 11 | AAGAAATAGGGAATT |
| | | GGGACAGGGCACCAT |
| SEQ ID | GI 14594701 AY037115 Homo sapiens | AAGTACCGAGTTCAA |
| NO: 1603 | thymic stromal lymphopoietin | CAACACCGTCTCTTG |
| | (TSLP) mRNA, complete cds | TAGCAATCGGCCACA |
| | | TTGCCTTACTGAAAT |
| SEQ ID | GI 117606571 EF064760 Homo sapiens | CTTCCAGCAGTGCTC |
| NO: 1604 | chemokine | TTGGATCTAGGAGGG |
| | (C-C motif) receptor 3 | AGGAGAAGGAAGGTA |
| | (CCR3) gene, complete cds | CACAGCAATTTAGAG |
| SEQ ID | GI 341865533 NG_029560 Homo sapiens | CAGGAGTCAGGTAGA |
| NO: 1605 | aquaporin 4 | GACGGATGACCTGAT |
| | (AQP4), RefSeqGene on chromosome 18 | TCTAAAACCTGGAGT |
| | | GGTGCATGTGATTGA |
| SEQ ID | GI 224586932 NG_011403 Homo sapiens | ATGACTGTCTGAAGG |
| NO: 1606 | coagulation factor VIII | CAGAAATATCCCAGA |
| | (F8), RefSeqGene on chromosome X | GTACAGGCAGAGACA |
| | | AATGAGGGAGGAAGG |
| SEQ ID | GI 224809244 NG_011449 Homo sapiens | CTCCTTTGAACTTTA |
| NO: 1607 | 3-hydroxy-3-methylglutaryl-CoA reductase | ATGTCCCAGGATTGT |
| | (HMGCR), RefSeqGene on chromosome 5 | AGTGCTGGAGCAGGA |
| | | TTAGACCCAGGCAAC |
| SEQ ID | GI 389565481 NM_002054 Homo sapiens | GTGATGTAAGTTCTT |
| NO: 1608 | glucagon | ATTTGGAAGGCCAAG |
| | (GCG), mRNA | CTGCCAAGGAATTCA |
| | | TTGCTTGGCTGGTGA |
| SEQ ID | GI 1027853651 NM_182828 Homo sapiens | TTTAGGGAGAGGAAG |
| NO: 1609 | growth differentiation factor 7 | GTGTTTGTGCTGATG |
| | (GDF7), mRNA | TTGCAGTTAGAGGCA |
| | | CGAAAATCAGGTAGC |
| SEQ ID | GI 387763637 NM_001098272 Homo sapiens | GAAAGTCTCTTTGCT |
| NO: 1610 | 3-hydroxy-3-methylglutaryl-CoA synthase 1 | CTATTTGCTGACATG |
| | (HMGCS1), transcript variant 1, mRNA | CTTCCTGTTGTGGTC |
| | | TGGCCAATGCCAAAT |
| SEQ ID | GI 117606571 EF064760 Homo sapiens | TGAGAGCCAGACCCC |
| NO: 1611 | chemokine | ATCTCCAGAGACTCT |
| | (C-C motif) receptor 3 | GATTTAATTGTTCAG |
| | (CCR3) gene, complete cds | GGTTATAAGCTGGGG |
| SEQ ID | GI 392055950 JQ867454 Homo sapiens | ACAGAAAAGCCAGAC |
| NO: 1612 | ERBB receptor feedback inhibitor 1 | TCAAAAACAAAAATG |
| | (ERRFIl) gene, complete cds | GATCTGGGTGGCCAC |
| | | GTGAAGCGTAAACAT |
| SEQ ID | GI 32263626 AY325910 Homo sapiens | AAAAAGGGCAGAGTG |
| NO: 1613 | hydroxysteroid | ACATGGCTGAGCTGT |
| | (17-beta) dehydrogenase 2 | TGGAAGCTCCATTGT |
| | (HSD17B2) gene, complete cds | TCTGTAGTGACTTAA |
| SEQ ID | GI 302128095 AB542701 Homo sapiens | TCTCCGAACCTCAGT |
| NO: 1614 | NOD2 gene for nucleotide-binding | TTTTCTATCTGTAAA |
| | oligomerization domain containing 2, | ATGGGGTGACGGGAG |
| | | AGAGGAATGGCAGAA |
| SEQ ID | GI 209447084 NG_008733 Homo sapiens | TGTAAAGTGTTTGCT |
| NO: 1615 | copper chaperone for superoxide dismutase | CTCTGGGAGTAAAGT |
| | (CCS), RefSeqGene on chromosome 11 | CCAACCAGCTCAGGG |
| | | TTGATGATTTGAGGC |
| SEQ ID | GI 19339222 NG_UU/959 Homo sapiens | CTGTGGATTCATGTT |
| NO: 1616 | cytocnrome P450 Tamlly 2/ subfamily | TAGCATGGAGACTGC |
| | a member 1 | CATGAACCTGCATGT |
| | (CYP2/A1), KeTseqsene on chromosome | TTTTTCCTGCTAGGC |
| | [symbol] | |
| SEQ ID | GI 221554534 NG_009447 Homo sapiens | AAGATGTATCTGGCC |
| NO: 1617 | dual oxidase 2 | AGAGGAAGAGGCATT |
| | (DUOX2), RefSeqGene on chromosome 15 | GTTTCTTTTACACAA |
| | | AGGACCTGCAGGGTT |
| SEQ ID | GI 195546896 NG_008330 Homo sapiens | CTGCTGTTTTGTAGC |
| NO: 1618 | integrin subunit alpha 2 | AAGTCAGAAAGCCTG |
| | (ITGA2), RefSeqGene on chromosome 5 | TTCTTTGTCCCACAG |
| | | GGAGATGTTACCTCA |
| SEQ ID | GI 1026191091 NG_047061 Homo sapiens | TCCTGAAAGATCAGG |
| NO: 1619 | marker of proliferation Ki-67 | TCTTTGCGAAGCATA |
| | (MKI67), RefSeqGene on chromosome 10 | TTGGCAAAGAAGGGG |
| | | CAACAAGAATGCAAG |
| SEQ ID | GI 209977115 NM_153692 Homo sapiens | AGCTCTTGACAGTGA |
| NO: 1620 | HtrA serine peptidase 4 | TTCCCTTTCCATGGC |
| | (HTRA4), mRNA | TGTTCTTCGGGGAAA |
| | | AGATAATTTGCTCCT |
| SEQ ID | GI 210147537 NM_025106 Homo sapiens | CGATCAGAATACTGG |
| NO: 1621 | splA/ryanodine receptor domain | AGACGAGACCACGAG |
| | and SOCS box containing 1 | ATTGATGAGTTTGCC |
| | (SPSB1), mRNA | TTGGGAGTCGGTAAG |
| SEQ ID | GI 371875636 NM_182919 Homo sapiens | CAAAAACCCCTGCTC |
| NO: 1622 | toll like receptor adaptor molecule 1 | TGTCAAAGACCAGAC |
| | (TICAM1), mRNA | GCCACTCCAACTTTC |
| | | TGTAGAAGATACCAC |
| SEQ ID | GI 62003164 AY974245 Homo sapiens | ACTGCCCTACCTCCT |
| NO: 1623 | alcohol dehydrogenase 4 | TCAGGCTGACTCCAC |
| | (class II), pi polypeptide | TTATCACTTCCTCTC |
| | (ADH4) gene, complete cds | AGAGATCTACTTCAG |
| SEQ ID | GI 39654020 AY496422 Homo sapiens | GCTTGGAGGTGGAGG |
| NO: 1624 | nuclear factor of kappa light | TGGAGTGGAGAGCAT |
| | polypeptide gene enhancer in | AAATTATATTTCTGC |
| | B-cells inhibitor, alpha | AGGTGAAACCAGAGC |
| | (NFKBIA) gen [symbol] | |
| SEQ ID | GI 1135449812 NG_052668 Homo sapiens | CTTGCCAGGGTTACT |
| NO: 1625 | acyl-CoA oxidase 2 | TCATTTAATCCACAC |
| | (ACOX2), RefSeqGene on chromosome 3 | AGCCCTGGGAGGGAG |
| | | ACTGACATTATTTCC |
| SEQ ID | GI 189409117 NG_007972 Homo sapiens | CATGATCAAGAGCAC |
| NO: 1626 | cytochrome P450 family 2 | CACTCTTAACACCCA |
| | subfamily C member 8 | TGTGCTCCACCCTCA |
| | (CYP2C8), RefSeqGene on chromosome 10 | CAATACACCATCATT |
| SEQ ID | GI 973353146 NG_016274 Homo sapiens | GGGAAGGCTGTTCTG |
| NO: 1627 | hepatocyte growth factor | TGGATGAGTTTAATT |
| | (HGF), RefSeqGene on chromosome 7 | CAGCCCCACAATCAC |
| | | TTCTGTACAGCTACC |
| SEQ ID | GI 343488503 NG_029728 Homo sapiens | GCAGTATTTAGGCAG |
| NO: 1628 | protein kinase cAMP-activated | TTCGGAAGTCTGTAC |
| | catalytic subunit beta | CAGCTTTAACTTTCC |
| | (PRKACB), RefSeqGene on chromosom [symbol] | ACTGGGCCCTCTTTC |
| SEQ ID | GI 975830227 NG_021386 Homo sapiens | CAAATCCCTTGCACT |
| NO: 1629 | TGF-beta activated kinase | TAGGACAACCAAAAC |
| | 1/MAP3K7 binding protein 2 | CAGAAGGCACAATGA |
| | (TAB2), RefSeqGene on chromosome [symbol] | GAAGCCAGCAGTTAC |
| SEQ ID | GI 82880650 NM_004051 Homo sapiens | CCATAGGATGCTTTT |
| NO: 1630 | 3-hydroxybutyrate dehydrogenase 1 | GTACCGTGGACCTTG |
| | (BDHl), transcript variant 1, mRNA | TTCTAGCAGGATCCT |
| | | TTCGGAATTGCACTT |
| SEQ ID | GI 38016940 NM_014365 Homo sapiens | CTTCACAAAGAAAAT |
| NO: 1631 | heat shock protein family B | CCAGCTTCCTGCAGA |
| | (small) member 8 | GGTGGATCCTGTGAC |
| | (HSPB8), mRNA | AGTATTTGCCTCACT |
| SEQ ID | GI 33946335 NM_002166 Homo sapiens | GCAGGCTTCTGAATT |
| NO: 1632 | inhibitor of DNA binding 2, HLH protein | CCCTTCTGAGTTAAT |
| | (ID2), mRNA | GTCAAATGACAGCAA |
| | | AGCACTGTGTGGCTG |
| SEQ ID | GI 163644319 NM_032873 Homo sapiens | TTGGCACATTTTAAT |
| NO: 1633 | ubiquitin associated and SH3 | GCATAAGCTGGGGGT |
| | domain containing B | TTCATTTTCCCAGGC |
| | (UBASH3B), mRNA | TCTCTTCACCATCAC |
| SEQ ID | GI 916259104 NG_042801 Homo sapiens | GAGGTTCATCTCATG |
| NO: 1634 | bromodomain containing 2 | GTTCTGAGGACAGTT |
| | (BRD2), RefSeqGene on chromosome 6 | GAGGAAAGATGGTGG |
| | | GGTCTGTTTGCATTC |
| SEQ ID | GI 584458490 NG_012645 Homo sapiens | TATGCATATGGCTCG |
| NO: 1635 | FK506 binding protein 5 | GCTGGCAGTCTCCCT |
| | (FKBP5), RefSeqGene on chromosome 6 | AAAATTCCCTCGAAT |
| | | GCAACTCTCTTTTTT |
| SEQ ID | GI 374349247 NG_032044 Homo sapiens | ACCCAATGTATTGTA |
| NO: 1636 | glutamic-oxaloacetic transaminase 1 | AAAATGAAATGTCAA |
| | (GOT1), RefSeqGene on chromosome 10 | AGGGAGGCTGCCGCG |
| | | GGTACTCAATGCAAG |
| SEQ ID | GI 270047500 NG_016132 Homo sapiens | ATGGAGAATAGGCTG |
| NO: 1637 | selectin L | TTTGTGTTAGTGAAG |
| | (SELL), RefSeqGene on chromosome 1 | TGTAGGACCTTGGTG |
| | | AGAGCAGTCTCAGGG |
| SEQ ID | GI 40794510 AY497547 Homo sapiens | ACTTCAAGAAGTTCA |
| NO: 1638 | chemokine-like receptor 1 | AGGTGGCCCTCTTCT |
| | (CMKLR1) mRNA, complete cds | CTCGCCTGGTCAATG |
| | | CTCTAAGTGAAGATA |
| SEQ ID | GI 208879434 NM_004895 Homo sapiens | ATCAGGCTGGAGCTG |
| NO: 1639 | NLR family pyrin domain containing 3 | CTGAAATGGATTGAA |
| | (NLRP3), transcript variant 1, mRNA | GTGAAAGCCAAAGCT |
| | | AAAAAGCTGCAGATC |
| SEQ ID | GI 219842351 NM_002522 Homo sapiens | GACAAGTTCCAGCTC |
| NO: 1640 | neuronal pentraxin 1 | ACATTCCCACTGCGG |
| | (NPTX1), mRNA | ACCAACTATATGTAT |
| | | GCCAAGGTGAAGAAG |
| SEQ ID | GI 257743127 NG_012865 Homo sapiens | CCTCACCTGAGAGCT |
| NO: 1641 | amylo-alpha-1, 6-glucosidase, | TGTTAGAAATGCAGA |
| | 4-alpha-glucanotransferase | TTCTTGGACCCTATG |
| | (AGL), RefSeqGene on chromosom [symbol] | CCAAACCTCCCAAAT |
| SEQ ID | GI 1025608649 NG_047040 Homo sapiens | GGCTATTATTGCCCT |
| NO: 1642 | calcium/calmodulin dependent | CTAACAGGAAGACGC |
| | protein kinase 11 alpha | AGAAAGGTGATGTGT |
| | (CAMK2A), RefSeqGene on chromos [symbol] | CAAGTTCAGCGTCAC |
| SEQ ID | GI 1028908925 NG_050621 Homo sapiens | CGAAGAGATCAAAGA |
| NO: 1643 | glutathione peroxidase 4 | GTTCGCCGCGGGCTA |
| | (GPX4), RefSeqGene on chromosome 19 | CAACGTCAAATTCGA |
| | | TATGTTCAGCAAGAT |
| SEQ ID | GI 1140392578 NG_052831 Homo sapiens | AATGCAGAAAAGGCA |
| NO: 1644 | glutamate metabotropic receptor 5 | CAGAAGGAACATCAG |
| | (GRM5), RefSeqGene on chromosome 11 | AGGAAAATGAGGGGG |
| | | AACAGGAACTCTGAG |
| SEQ ID | GI 307133693 NG_027728 Homo sapiens | GCAAGGGAGTCTCCT |
| NO: 1645 | interferon regulatory factor 4 | TTCTCAGCTTCATCG |
| | (IRF4), RefSeqGene on chromosome 6 | CTTCTACTGATTACA |
| | | TGGCTCAGCTCCTAT |
| SEQ ID | GI 325651825 NG_028190 Homo sapiens | CCTAACCACTTCTCT |
| NO: 1646 | notch 4 | GTCTCCGTTGCAATT |
| | (NOTCH4), RefSeqGene on chromosome 6 | TCTCCTTTTTCTCAA |
| | | GCTCCAGCCTAGTGC |
| SEQ ID | GI 1024336758 NG_046923 Homo sapiens | CCTCAAAGCTATGTC |
| NO: 1647 | zinc fingers and homeoboxes 3 | TTCCTGCCATGGAGT |
| | (ZHX3), RefSeqGene on chromosome 20 | GGATTCTCTCTCACT |
| | | GGTGTGTGTACTCTC |
| SEQ ID | GI 68303552 NM_005165 Homo sapiens | CAAATAGCTATGCAG |
| NO: 1648 | aldolase, fructose-bisphosphate C | AGCAGAGATGCCTTC |
| | (ALDOC), mRNA | ACCTGGCACCAACTT |
| | | GTCTTCCTTTCTCTC |
| SEQ ID | GI 82659110 NM_007172 Homo sapiens | CAGACGAGTTGCACA |
| NO: 1649 | nucleoporin 50 | AAATTTTACTGGAGA |
| | (NUP50), transcript variant 2, mRNA | AAAAGGATGCCTGAA |
| | | CACGCAAAGTCGGCT |
| SEQ ID | GI 67515430 DQ088982 Homo sapiens | GCCTTTGATTGGTAC |
| NO: 1650 | glutathione peroxidase 6 | AAGGGCTGTGTAGTG |
| | (olfactory) | TGACTGGCAATGTAG |
| | (GPX6) gene, complete cds | AAGAATGCTCCATCT |
| SEQ ID | GI 269784608 NG_015894 Homo sapiens | AGACCTGTTGGAGGC |
| NO: 1651 | apolipoprotein A5 | TATGAATGCAATCAA |
| | (APOA5), RefSeqGene on chromosome 11 | GGTGACAGACAACTG |
| | | GTGCAATGATGGTAG |
| SEQ ID | GI 224809245 NG_011450 Homo sapiens | TTGCCCTCCACTTTG |
| NO: 1652 | interferon regulatory factor 1 | CTTAACACTCAGTTA |
| | (IRF1), RefSeqGene on chromosome 5 | GGTTCCTTCCTCAGT |
| | | TTCTCCTACCTCCTT |
| SEQ ID | GI 1176461486 NG_030337 Homo sapiens | TAAAAGACCATCCCA |
| NO: 1653 | NLR family CARD domain containing 5 | ACTGTGCTCTACCAC |
| | (NLRC5), RefSeqGene on chromosome 16 | ACTTTGCTCTCCTGG |
| | | CTAAGACTCAGAGAC |
| SEQ ID | GI 205277388 NG_008604 Homo sapiens | TTTCCACAAATAATG |
| NO: 1654 | polycystin 2, transient receptor | CTTCAACTAGTACTT |
| | potential cation channel | GCGTGCCAGTGACTC |
| | (PKD2), RefSeqGene on chromosom [symbol] | CACGTCCCACTCATG |
| SEQ ID | GI 343403846 NG_029699 Homo sapiens | AGAAATAGTCGGAAC |
| NO: 1655 | protein kinase cAMP-activated | TATTGGTCGAAAAGG |
| | catalytic subunit alpha | AAGGCCAGTTTTTGG |
| | (PRKACA), RefSeqGene on chromosom [symbol] | TCTCAAACCCCAGCA |
| SEQ ID | GI 298566320 NM_001005353 Homo sapiens | GTGTGCCCATCTCTT |
| NO: 1656 | adenylate kinase 4 | TGGTAGGGAAGGAGA |
| | (AK4), transcript variant 1, mRNA | AAGGTAAGAATAGCC |
| | | ATCAGTGAGGAAGGA |
| SEQ ID | GI 49066030 AY654286 Homo sapiens | TCACTCAGTTTTTCC |
| NO: 1657 | interferon | TTTACTGGATCTCTG |
| | (alpha, beta and omega) receptor 1 | GGACACTGCTCTTTC |
| | (IFNAR1) gene, complete cds | CTGGTTCTCCTCCTG |
| SEQ ID | GI 54781360 AY789109 Homo sapiens | TCCTGCAAATGTGCA |
| NO: 1658 | interleukin 3 receptor, alpha | AACAGACATGGCTAC |
| | (low affinity) | ATAGAGGCATGCACA |
| | (IL3RA) gene, complete cds | CATATAGACCCATGT |
| SEQ ID | GI 350606343 NG_030328 Homo sapiens | GGCATTTCACCTCTT |
| NO: 1659 | neuropilin 1 | GTCACCTCCAAGTGT |
| | (NRP1), RefSeqGene on chromosome 10 | GTGGTTGAAATAGAG |
| | | GTATCCAACCGTGTT |
| SEQ ID | GI 238776808 NG_012244 Homo sapiens | CCTCACTAGAAACAC |
| NO: 1660 | SMAD family member 6 | TAGATGTGAGGGTTT |
| | (SMAD6), RefSeqGene on chromosome 15 | GGCAAGGGCGTGATA |
| | | GGGACTTACTAGCTG |
| SEQ ID | GI 61676924 NM_012242 Homo sapiens | GACCCAGGCTTGCAA |
| NO: 1661 | dickkopf WNT signaling pathway | AGTGACGGTCATTTT |
| | inhibitor 1 | CTCTTTCTTTCTCCC |
| | (DKK1), mRNA | TCTTGAGTCCTTCTG |
| SEQ ID | GI 1101010097 NG_052015 Homo sapiens | TGTTCCTCAGAAGTG |
| NO: 1662 | adenosine deaminase, RNA specific B1 | TCCAGGTCATGAACA |
| | (ADARB1), RefSeqGene on chromosome 21 | CTGGAAACACCGAGG |
| | | ATTGGTCTAAGCTTA |
| SEQ ID | GI 163954975 NG_007078 Homo sapiens | CACAGAATTGTATCA |
| NO: 1663 | electron transfer flavoprotein | CTGATGAGAGCTGTG |
| | dehydrogenase | GCGACAGAGTGCTCA |
| | (ETFDH), RefSeqGene on chromosome 4 | CCATGTCTCTTTTGC |
| SEQ ID | GI 343168757 NG_029673 Homo sapiens | AATGTCTTCGCACGT |
| NO: 1664 | Fos proto-oncogene, AP-1 | AGGTTTTGCACAGTG |
| | transcription factor subunit | TTTATCTGCTGGTGT |
| | (FOS), RefSeqGene on chromosome 1 [symbol] | CTCAGGGATTTGACA |
| SEQ ID | GI 194018566 NG_008183 Homo sapiens | GAGCAATCTGAGAAG |
| NO: 1665 | pancreatic and duodenal homeobox 1 | CGAATTCGTTTTTCA |
| | (PDX1), RefSeqGene on chromosome 13 | CCAACCGAAAGCAAT |
| | | TGAAGCTGTCTCCCC |
| SEQ ID | GI 38327038 NM_002154 Homo sapiens | ATGAGGAGCCAATGG |
| NO: 1666 | heat shock protein family A | AAACAGATCAGAATG |
| | (Hsp70) member 4 | CAAAGGAGGAAGAGA |
| | (HSPA4), mRNA | AGATGCAAGTGGACC |
| SEQ ID | GI 1036032720 AH002608 Homo sapiens | TGGAGTCACTGCCAA |
| NO: 1667 | amphiregulin | GTCATAGCCATAAAT |
| | (AREG) gene, complete cds | GATGAGTCGGTCCTC |
| | | TTTCCAGTGGATCAT |
| SEQ ID | GI 58802450 AY916056 Homo sapiens | AGGGCTTCAGTGAGG |
| NO: 1668 | flavin containing monooxygenase 2 | AGCTCAGGTCTGGAC |
| | (FMO2) gene, complete cds | TACTTGAACATGAGA |
| | | TGTCTGATGACTCTA |
| SEQ ID | GI 238776813 NG_012250 Homo sapiens | TCTTATCAGTGGAGA |
| NO: 1669 | aldehyde dehydrogenase 2 family | AGGGAGGATGGGTTG |
| | (mitochondrial) | TTGAAAATGCAGCCT |
| | (ALDH2), RefSeqGene on chromosome 12 | GGTTCAACAGTGAAG |
| SEQ ID | GI 292494880 NG_007148 Homo sapiens | GTGTGGTCCCCAAGA |
| NO: 1670 | ATPase phospholipid transporting 8B1 | CCTCCACTAACTTCA |
| | (ATP8B1), RefSeqGene on chromosome 18 | AGTTGTAGTGCAAAG |
| | | GAAGGAAAGCATTCA |
| SEQ ID | GI 1150561157 NG_052945 Homo sapiens | GTAGGTTACTTTCAG |
| NO: 1671 | succinate-CoA ligase GDP- | GGATGGTCTCTGGCC |
| | forming beta subunit | ACAAGTCCCTCAAGC |
| | (SUCLG2), RefSeqGene on chromosome 3 | TAGTTAGAACCTTCC |
| SEQ ID | GI 371877908 NG_031992 Homo sapiens | AATACTGGCTGACCA |
| NO: 1672 | Wnt family member 5A | CCTTGGTGAACTATT |
| | (WNT5A), RefSeqGene on chromosome 3 | GAGCTTGCCTAGGTT |
| | | GACTCATGAGTGAGA |
| SEQ ID | GI 1057867548 NM_020661 Homo sapiens | AGGACCTCCTAATGA |
| NO: 1673 | activation induced cytidine deaminase | GAGTATCTGGGTGAT |
| | (AICDA), transcript variant 1, mRNA | TGTGACCCCAAACCA |
| | | TCTCTCCAAAGCATT |
| SEQ ID | GI 1036029829 AH003667 Homo sapiens | GCAGTCTATGCTGTT |
| NO: 1674 | chromosome 1 leptin receptor | CAGGTGCGCTGTAAG |
| | (LEPR) gene, complete cds | AGGCTAGATGGACTG |
| | | GGATATTGGAGTAAT |
| SEQ ID | GI 336020352 NM_004834 Homo sapiens | CACTCTGACCTCTTG |
| NO: 1675 | mitogen-activated protein | TCAGTTTCCTGTTCC |
| | kinase kinase kinase kinase 4 | TGGTTCCATCTTTTT |
| | (MAP4K4), transcript variant 1, mR [symbol] | GAAAAAGGCCCTCCT |
| SEQ ID | GI 315013554 NG_027996 Homo sapiens | GCACACTGCATACTG |
| NO: 1676 | granzyme A | TTCCTCCAGGGACTG |
| | (GZMA), RefSeqGene on chromosome 5 | AGGTTGACTCTTCTT |
| | | AGAGTGAGACATTCC |
| SEQ ID | GI 388490119 NG_032755 Homo sapiens | ATAAAGTGTTCTCAA |
| NO: 1677 | interferon induced transmembrane protein 3 | GCTGGAAAGATTTAA |
| | (IFITM3), RefSeqGene on chromosome 11 | CAGATTGGCCCCTCG |
| | | GGGACCTGGACATTG |
| SEQ ID | GI 301336145 NG_023427 Homo sapiens | CAAAATCCTTATGGG |
| NO: 1678 | myocyte enhancer factor 2C | AGTATCACTTAGCAC |
| | (MEF2C), RefSeqGene on chromosome 5 | CCAGCCAGGAAGGAA |
| | | TCTCTCATCCCCTCA |
| SEQ ID | GI 1024846751 NG_047008 Homo sapiens | TTCCTCCAAACACCC |
| NO: 1679 | pyruvate dehydrogenase kinase 4 | CAGATCACCCTTAAC |
| | (PDK4), RefSeqGene on chromosome 7 | ATATCCACTGTCTGG |
| | | CACCATCACTACTAC |
| SEQ ID | GI 1140398720 NG_052834 Homo sapiens | CCGATTAAGAAACTG |
| NO: 1680 | TNF receptor superfamily member 9 | GGGGTGAGAGACTAA |
| | (TNFRSF9), RefSeqGene on chromosome 1 | GCAGGCAAGACAGAC |
| | | TGAACTAAGCTGTCA |
| SEQ ID | GI 1126528245 AF058925 Homo sapiens | CTGAAGCTCCTCTTC |
| NO: 1681 | Jak2 kinase mRNA, complete cds | TTGATGACTTTGTCA |
| | | TGTCTTACCTCTTTG |
| | | CTCAGTGGCGGCATG |
| SEQ ID | GI 15128210 AF402002 Homo sapiens | TGTGAAGGCTTTGGG |
| NO: 1682 | interleukin 20 | GGAACTAGACATTCT |
| | (IL20) gene, complete cds | TCTGCAATGGATGGA |
| | | GGAGACAGAATAGGA |
| SEQ ID | GI 685156953 NG_034254 Homo sapiens | AAAGGTGCTTTCTTC |
| NO: 1683 | cyclin D2 | TGGGAGATCTGCTTC |
| | (CCND2), RefSeqGene on chromosome 12 | CTTTAATAACGGTGC |
| | | AAGACCAGTGGTTCG |
| SEQ ID | GI 226509828 NG_011801 Homo sapiens | GACTGAGTGTCTGCT |
| NO: 1684 | carnitine palmitoyltransferase 1A | CACTGTTAGAGGGAC |
| | (CPT1A), RefSeqGene on chromosome 11 | AGGTGCAAAGTGAAT |
| | | TAGTCCATCCAGGAT |
| SEQ ID | GI 388490119 NG_032755 Homo sapiens | TTCAGGTTTTTTTCT |
| NO: 1685 | interferon induced transmembrane protein 3 | ATCTACTGGGAGACT |
| | (IFITM3), RefSeqGene on chromosome 11 | GCCTTTCCTTGGCGC |
| | | TGGTTGCTACCAATT |
| SEQ ID | GI 1142736558 NG_052842 Homo sapiens | CCTTTCCCATTGGCT |
| NO: 1686 | pyruvate dehydrogenase | CAGCTGTTCAGAAGG |
| | phosphatase regulatory subunit | AGAGCTGGACATCTC |
| | (PDPR), RefSeqGene on chromos [symbol] | TTGTTCTTTTCCATT |
| SEQ ID | GI 238018083 NG_012204 Homo sapiens | TGGCACTAACAGCGT |
| NO: 1687 | peroxisome proliferator | TCAAAGAACTTGCGT |
| | activated receptor alpha | GACAAGTGATGACTA |
| | (PPARA), RefSeqGene on chromosome 22 | ATGACACTGAGGGTG |
| SEQ ID | GI 189409110 NM_153000 Homo sapiens | TAGAGAAAAGTGCCT |
| NO: 1688 | APC down-regulated 1 | GGAGGGCTTTTAAGG |
| | (APCDD1), mRNA | AGTCACAGTGCCATC |
| | | ACATGCTCAAACATC |
| SEQ ID | GI 117606557 EF064753 Homo sapiens | ACCGGGTAAGTCCTA |
| NO: 1689 | CD40 ligand | CATGCTCACTGTTGG |
| | (TNF superfamily, member 5, | TTATCTCCCTGGGCT |
| | hyper-IgM syndrome) | CATGGTTTTAACTTA |
| | (CD40LG) gene, complete cds | |
| SEQ ID | GI 19909347 AF495471 Homo sapiens | GATCCTGGAGGATGC |
| NO: 1690 | thrombomodulin | CCAATTAGGGCCTAG |
| | (THBD) gene, complete cds | CCTTAATCAGGTCCT |
| | | CAGAGAATTTCTACC |
| SEQ ID | GI 47419892 AY623660 Homo sapiens | GATATGATTCAGCCT |
| NO: 1691 | TNF receptor-associated factor 2 | TAAAAAGGAAGGCGA |
| | (TRAF2) gene, complete cds | TTCGGACACACACAC |
| | | CCCAGGGATGAACTC |
| SEQ ID | GI 237874189 NG_012169 Homo sapiens | GAATGTGGTCCAGCC |
| NO: 1692 | angiopoietin like 4 | CTTTAGCCTCACTCA |
| | (ANGPTL4), RefSeqGene on chromosome 19 | GTACTTCCTTTGTCC |
| | | CAACTCTATCCCTAC |
| SEQ ID | GI 209977039 NG_008841 Homo sapiens | TGCACTATCTGGCCA |
| NO: 1693 | dopamine receptor D2 | CCCTCAGCCATGAAG |
| | (DRD2), RefSeqGene on chromosome 11 | ACATTATAGGTTGGA |
| | | TGGAAATTTTTCGCA |
| SEQ ID | GI 374253764 NG_032037 Homo sapiens | ATCAGGAGAAACAGA |
| NO: 1694 | SMAD family member 5 | TGCTGTTTAAGTCAG |
| | (SMAD5), RefSeqGene on chromosome 5 | GAAGAAATGAGTGTT |
| | | CGCTCCAAGGCCTGC |
| SEQ ID | GI 48255965 NM_006759 Homo sapiens | ATGTAAAGGGCGGGA |
| NO: 1695 | UDP-glucose pyrophosphorylase 2 | CACTCACTCAATATG |
| | (UGP2), transcript variant 1, mRNA | AAGGCAAACTGAGAC |
| | | TGGTGGAAATTGCTC |
| SEQ ID | GI 209977034 NM_021995 Homo sapiens | CCCTTCTACAGATAC |
| NO: 1696 | urotensin 2 | TGCCAGAGATGCTGG |
| | (UTS2), transcript variant 1, mRNA | GTGCAGAAAGAGGGG |
| | | ATATTCTCAGGAAAG |
| SEQ ID | GI 1049010976 AH002711 Homo sapiens | TTCTAAAGTCGAGCT |
| NO: 1697 | platelet glycoprotein Illa | GGAAGTGCGTGACCT |
| | (ITGB3) gene, complete cds | CCCTGAAGAGTTGTC |
| | | TCTATCCTTCAATGC |
| SEQ ID | GI 156151447 NG_006672 Homo sapiens | TAGAGGTGGCCATGA |
| NO: 1698 | actin, alpha 1, skeletal muscle | GTGCAAAAACCACCA |
| | (ACTA1), RefSeqGene on chromosome 1 | GCTTCAGGAGGAGGA |
| | | AAAAGTAGAAAATCC |
| SEQ ID | GI 298676536 NG_021477 Homo sapiens | AAAACTTCTGCACAC |
| NO: 1699 | glutamate decarboxylase 1 | AGAAGCATTCCAAAA |
| | (GAD1), RefSeqGene on chromosome 2 | AGTCTGTCTCCAGCC |
| | | TGTAGGAGCCAGAAT |
| SEQ ID | GI 342307070 NG_029606 Homo sapiens | AGGGTGAGACTGCGA |
| NO: 1700 | hypoxia inducible factor 1 alpha subunit | CAAAGACTTGAAAAA |
| | (HIF1A), RefSeqGene on chromosome 14 | GGTGGAGAAGCAAGC |
| | | CTTGTGGGTATTTAG |
| SEQ ID | GI 260763977 NG_013058 Homo sapiens | CATCGAGGGTATGAG |
| NO: 1701 | 5-hydroxytryptamine receptor 3A | AACATCCAGAATTTC |
| | (HTR3A), RefSeqGene on chromosome 11 | CCTCCCACCTGTTAT |
| | | ACCTCCTGGAAGCTG |
| SEQ ID | GI 335892866 NG_029106 Homo sapiens | TCCGCCCATAAACTC |
| NO: 1702 | interferon regulatory factor 7 | AGCCCCAACAACTTT |
| | (IRF7), RefSeqGene on chromosome 11 | AGTTTCAAAGTAAGA |
| | | TGGGAACATGGGGAA |
| SEQ ID | GI 325651825 NG_028190 Homo sapiens | GTGAGCACTGATGTG |
| NO: 1703 | notch 4 | GAAATTATTGGAAAA |
| | (NOTCH4), RefSeqGene on chromosome 6 | AGCCATGCCAAGCTC |
| | | ACAGTGGGAAGTGTC |
| SEQ ID | GI 440918690 NM_001272072 Homo sapiens | GTTTCTCATCGAGAT |
| NO: 1704 | amine oxidase, copper containing 1 | GCTGCTGCCCAAGAA |
| | (AOC1), transcript variant 1, mRNA | GTACCATGTGCTGAG |
| | | GTTTCTGGATAAAGG |
| SEQ ID | GI 545746351 NM_006228 Homo sapiens | CAGGAAGTTGGCCAA |
| NO: 1705 | prepronociceptin | TCAGAAGCGGTTCAG |
| | (PNOC), transcript variant 1, mRNA | TGAGTTTATGAGGCA |
| | | ATACTTGGTCCTGAG |
| SEQ ID | GI 542029075 NM_006440 Homo sapiens | CGAAGGTGCCTTGGA |
| NO: 1706 | thioredoxin reductase 2 | ATATGGAATCACAAG |
| | (TXNRD2), transcript variant 1, mRNA | TGATGACATCTTCTG |
| | | GCTGAAGGAATCCCC |
| SEQ ID | GI 198442852 NG_008474 Homo sapiens | ACCCTTGAAGAAAAG |
| NO: 1707 | aryl hydrocarbon receptor interacting | GGGTTTCAATTTTTG |
| | protein like 1 [symbol] | GATGATTAGGCTCAG |
| | (AIPL1), RefSeqGene on chromosome 1 | TAGTCCAGTGGGCCA |
| SEQ ID | GI 254039585 NG_012387 Homo sapiens | AGTGGCTATGGATTG |
| NO: 1708 | aldolase, fructose-bisphosphate B | CAACACATTGGTCTA |
| | (ALDOB), RefSeqGene on chromosome 9 | ATGAGGCCTGGAGAT |
| | | TGGTTCAGAAGCTTT |
| SEQ ID | GI 237820648 NG_012041 Homo sapiens | GAAGTCAGGGAAGGC |
| NO: 1709 | adenosine monophosphate deaminase 3 | CTCTCCAAGGAGATG |
| | (AMPD3), RefSeqGene on chromosome 11 | ACATCTTAGCGGATG |
| | | CTTCAGGGTATAAAG |
| SEQ ID | GI 334085198 NG_029002 Homo sapiens | ATCTGTCTCTCCCGC |
| NO: 1710 | BCL2 like 1 | CTGTAAAATGGAATA |
| | (BCL2L1), RefSeqGene on chromosome 20 | ATGATAGCCAGCTGC |
| | | CATAGCTTGACTCGA |
| SEQ ID | GI 1028908930 NG_050628 Homo sapiens | TTTGGTTGGGTATTC |
| NO: 1711 | nuclear factor kappa B subunit 1 | TGACCCAGCTCAGAG |
| | (NFKB1), RefSeqGene on chromosome 4 | TTTGTGCAAAGCACT |
| | | ATTTCCCAGTACCAG |
| SEQ ID | GI 542133069 NM_004335 Homo sapiens | CTTGAGGGAGAGATC |
| NO: 1712 | bone marrow stromal cell antigen 2 | ACTACATTAAACCAT |
| | (BST2), mRNA | AAGCTTCAGGACGCG |
| | | TCTGCAGAGGTGGAG |
| SEQ ID | GI 219555683 NM_176891 Homo sapiens | GCAGTACCAAAAAGG |
| NO: 1713 | interferon epsilon | ACACACTCTGGCCAT |
| | (IFNE), mRNA | TCTCCATGAGATGCT |
| | | TCAGCAGATCTTCAG |
| SEQ ID | GI 62865623 NM_198057 Homo sapiens | CAGCTTCACCTGACA |
| NO: 1714 | TSC22 domain family member 3 | ACGACTGTTCCTATG |
| | (TSC22D3), transcript variant 1, mRNA | AAGAAGCCACTTGTG |
| | | TTTTAAGCAGAGGCA |
| SEQ ID | GI 67515408 DQ080435 Homo sapiens | GATTCAGAGTGGGCA |
| NO: 1715 | calcitonin/calcitonin- | CATGTTGGGAGACAG |
| | related polypeptide, alpha | TAATGGGTTTGGGTG |
| | (CALCA) gene, complete cds | TGTGTAAATGAGTGT |
| SEQ ID | GI 194018568 NG_008185 Homo sapiens | CGTACTGCATTTGCC |
| NO: 1716 | lactate dehydrogenase A | CCTTGAGCCAGGTGG |
| | (LDHA), RefSeqGene on chromosome 11 | ATGTTTACCGTGTGT |
| | | TATATAACTTCCTGG |
| SEQ ID | GI 401709984 NG_032897 Homo sapiens | CTGCTTCCATTGTCA |
| NO: 1717 | platelet factor 4 | CATCTCCCCTCTCTC |
| | (PF4), RefSeqGene on chromosome 4 | CTCTGACCTTTCTGC |
| | | CTCTAACTCTACCTA |
| SEQ ID | GI 588480539 NG_033255 Homo sapiens | TGGACAGTTGTTCAG |
| NO: 1718 | ras homolog family member H | AGACCACGATCATGT |
| | (RHOH), RefSeqGene on chromosome 4 | GTCTGGTGTCTCACT |
| | | GTGGAATAGTGGTTT |
| SEQ ID | GI 341572552 NG_029517 Homo sapiens | CTGAAGATGGCCCTC |
| NO: 1719 | retinoid X receptor gamma | GCTGTGACATTTAAC |
| | (RXRG), RefSeqGene on chromosome 1 | AGCAACCTCAAAAGT |
| | | GAGAGACCCAAATCT |
| SEQ ID | GI 170014716 NG_007462 Homo sapiens | TTGTAGGTAAGAGCT |
| NO: 1720 | tumor necrosis factor | CTGAGGATGTGTCTT |
| | (TNF), RefSeqGene on chromosome 6 | GGAACTTGGAGGGCT |
| | | AGGATTTGGGGATTG |
| SEQ ID | GI 166158920 NM_013996 Homo sapiens | ATCCTCGTGGCCTTG |
| NO: 1721 | tachykinin precursor 1 | GCAGTCTTTTTTCTT |
| | (TAC1), transcript variant alpha, mRNA | GTCTCCACTCAGCTG |
| | | TTTGCAGAAGAAATA |
| SEQ ID | GI 1025608662 NG_047031 Homo sapiens | AGGCCCCTCCCTTAG |
| NO: 1722 | ATP citrate lyase | AGAATGTGTGTATGT |
| | (ACLY), RefSeqGene on chromosome 17 | GTGTGTTTTCAGGTT |
| | | CCTTGGCATGATTTC |
| SEQ ID | GI 190341054 NG_008010 Homo sapiens | GGTAAAGGAGTGGCA |
| NO: 1723 | aldolase, fructose-bisphosphate A | AGGGAGTCAGAGACA |
| | (ALDOA), RefSeqGene on chromosome 16 | AGAGATCTCTTTGGA |
| | | GAGGCATTCCAGAAG |
| SEQ ID | GI 345525419 NG_029928 Homo sapiens | GCTTGGAAAATGGAG |
| NO: 1724 | CD86 molecule | GCAGCACAGATGGTC |
| | (CD86), RefSeqGene on chromosome 3 | TCCTGCAGAAAGTCT |
| | | GGTGATAAAATGAGA |
| SEQ ID | GI 349585381 NG_030049 Homo sapiens | GGATACCAGCCCCTC |
| NO: 1725 | checkpoint kinase 1 | ATACATTGATAAATT |
| | (CHEK1), RefSeqGene on chromosome 11 | GGTACAAGGGATCAG |
| | | CTTTTCCCAGCCCAC |
| SEQ ID | GI 193794854 NG_008178 Homo sapiens | TACCATTTCCTTCCT |
| NO: 1726 | glycerol kinase | TGTAAGTCTGAAAGT |
| | (GK), RefSeqGene on chromosome X | TCTGGGCTCCAGTCT |
| | | CCCAAGTCCAGTGTT |
| SEQ ID | GI 296923725 NG_012838 Homo sapiens | TGCTTGTCAGGTGGT |
| NO: 1727 | glucose-6-phosphate isomerase | TGGCAGAATTCATTT |
| | (GPI), RefSeqGene on chromosome 19 | CTCTATGGTTGTGGA |
| | | ACTGAAGTCCAGCTT |
| SEQ ID | GI 1031698869 NG_050687 Homo sapiens | CCTGCCTAGCACCGT |
| NO: 1728 | HOP homeobox | GACAGGAATCAGTGC |
| | (HOPX), RefSeqGene on chromosome 4 | TATGATTTTTAGGTG |
| | | GGAAAGCACAGAATC |
| SEQ ID | GI 300244555 NG_023331 Homo sapiens | GCGAACGCTACGCCA |
| NO: 1729 | matrix Gia protein | TGGTTTATGGATACA |
| | (MGP), RefSeqGene on chromosome 12 | ATGCTGCCTATAATC |
| | | GCTACTTCAGGAAGC |
| SEQ ID | GI 388596695 NM_001227 Homo sapiens | TGCTAAGCCAGACCG |
| NO: 1730 | caspase 7 | GTCCTCGTTTGTACC |
| | (CASP7), transcript variant a, mRNA | GTCCCTCTTCAGTAA |
| | | GAAGAAGAAAAATGT |
| SEQ ID | GI 218083972 NM_134431 Homo sapiens | ATGGAGCATCATAGG |
| NO: 1731 | solute carrier organic anion | CCCAGAGAGACATGG |
| | transporter family member 1A2 | CTATGGACTTAGTAC |
| | (SLCO1A2), transcript variant 1, [symbol] | CTTGGCATCACTTTT |
| SEQ ID | GI 62361686 AY987960 Homo sapiens | CCTGGCTGATCCAGG |
| NO: 1732 | alcohol dehydrogenase 5 | GGATCTTGCTAGTAA |
| | (class III), chi polypeptide | CCTCTAACTGAAGCC |
| | (ADH5) gene, complete cds | TCATTCTAGCACATG |
| SEQ ID | GI 29825390 AY242132 Homo sapiens | TTGGATTCCAACCCT |
| NO: 1733 | cannabinoid receptor 2 | ATGAAGGATTACATG |
| | (CNR2) gene, complete cds | ATCCTGAGTGGTCCC |
| | | CAGAAGACAGCTGTT |
| SEQ ID | GI 27501923 AY204752 Homo sapiens | GATTTGGGGAAGTGG |
| NO: 1734 | excision repair cross-complementing | GCCATTTGTAAGGGT |
| | rodent repair deficiency, | TGGTCAGAGAAGACC |
| | complementation group 6 | TTTGATGAACTGACA |
| | (ERCC [symbol] | |
| SEQ ID | GI 994323652 NG_032159 Homo sapiens | TGATGCACCTGTTCC |
| NO: 1735 | CASP2 and RIPK1 domain containing | TCATGGTCTCCAGAC |
| | adaptor with death domain | TTTTCTGTGAAGTAC |
| | (CRADD), RefSeqGene on c [symbol] | AGCATGTAGTGTGGA |
| SEQ ID | GI 1154067877 NG_052975 Homo sapiens | TTTTCTCCTTCCTGG |
| NO: 1736 | C-X-C motif chemokine receptor 2 | GTACAGTGCTATTCT |
| | (CXCR2), RefSeqGene on chromosome 2 | GCCTAGAGGTGAGTT |
| | | TTTGCCTGTCTCACA |
| SEQ ID | GI 269954706 NG_015999 Homo sapiens | TGGCTGGCAATGGTC |
| NO: 1737 | enoyl-CoA hydratase and | TATGTTTACACCTTA |
| | 3-hydroxyacyl CoA dehydrogenase | GCAGAGAGAATTCAC |
| | (EHHADH), RefSeqGene on chr [symbol] | ACTCCTCTGTCCTCC |
| SEQ ID | GI 169790799 NG_007447 Homo sapiens | AGTTCACATCTCCGT |
| NO: 1738 | TGFB induced factor homeobox 1 | TTTTTCCTCCCCCTA |
| | (TGIF1), RefSeqGene on chromosome 18 | ATTCGAAAGAGGCTT |
| | | TCAATTGTCTCCGCC |
| SEQ ID | GI 57863305 NM_052872 Homo sapiens | GTGTAGGAACTTGGG |
| NO: 1739 | interleukin 17F | CTGCATCAATGCTCA |
| | (IL17F), mRNA | AGGAAAGGAAGACAT |
| | | CTCCATGAATTCCGT |
| SEQ ID | GI 82734235 NM_006084 Homo sapiens | TTCTGGGAAGAGAGC |
| NO: 1740 | interferon regulatory factor 9 | CATGGCTCCAGCCAT |
| | (IRF9), mRNA | ACTCCACAGAATCTT |
| | | ATCACAGTGAAGATG |
| SEQ ID | ref\|NG_OO9292.1\| Homo sapiens | CCTCTTGCCTTACTG |
| NO: 1741 | glutaryl-CoAdehydrogenase | AAAGCCCCCTTCTTT |
| | (GCDH), RefSeqGene on | CCCTAAGCCACAATT |
| | | TCCCAGTCTGTAAAG |
| SEQ ID | GI 343168757 NG_029673 Homo sapiens | TCAAGGACTTGAAAG |
| NO: 1742 | Fos proto-oncogene, AP-1 | CATCCATGTGTGGAC |
| | transcription factor subunit | TCAAGTCCTTACCTC |
| | (FOS), RefSeqGene on chromosome 1 [symbol] | TTCCGGAGATGTAGC |
| SEQ ID | GI 401709985 NG_032898 Homo sapiens | CATTCTTGACCCCAT |
| NO: 1743 | plasminogen activator, urokinase receptor | ATCCAACCCCAACTC |
| | (PLAUR), RefSeqGene on chromosome 19 | AACTTCACCTCCAAT |
| | | CCTATGCCCAACTTC |
| SEQ ID | GI 341572553 NG_029518 Homo sapiens | TTCAGTACCTGGACA |
| NO: 1744 | sestrin 1 | GCATTGGAGGATAAT |
| | (SESN1), RefSeqGene on chromosome 6 | GGTCAAGACCATGGG |
| | | CTGTGAAGTTAGTCA |
| SEQ ID | GI 48526521AY644470 Homo sapiens | GATGGGTTCAAATCC |
| NO: 1745 | interferon gamma receptor 2 | TGACTCTGCTTCCAC |
| | (interferon gamma transducer 1) | TTGGCTTCACGTCTT |
| | (IFNGR2) gene, complete cds | GAGCAATCTGCATAT |
| SEQ ID | GI 54781360 AY789109 Homo sapiens | TTTCTTTCAAACCAC |
| NO: 1746 | interleukin 3 receptor, alpha | AGGTCAGAGACAGAA |
| | (low affinity) | CCTCCTTCCAGCTAC |
| | (IL3RA) gene, complete cds | TCAATCCTGGAACGT |
| SEQ ID | GI 457232 L26524 Homo sapiens | GGATCATGGAAAAGT |
| NO: 1747 | PRKDC gene, complete sequence | CATGGGTTAACTGGA |
| | | AGACTTGCTCTGGCA |
| | | GATGGGACAAGGTTT |
| SEQ ID | GI 237820638 NG_012034 Homo sapiens | AAATGCTTCCTGTGA |
| NO: 1748 | ABL proto-oncogene 1, | ATGGAAGATGTGTTT |
| | non-receptor tyrosine kinase | CTGTGCCTCACTGTC |
| | (ABL1), RefSeqGene on chromosome 9 [symbol] | TTCACTGTGCTGGAT |
| SEQ ID | GI 261599023 NG_013217 Homo sapiens | TTTAGCAGCATCCCT |
| NO: 1749 | apoptosis inducing factor | GGCCATTACCCACTG |
| | mitochondria associated 1 | GATATGAGTAGCATC |
| | (AIFM1), RefSeqGene on chromosome [symbol] | CCTACCCAAGTTATT |
| SEQ ID | GI 339639570 NG_029386 Homo sapiens | GGGAATAACCCAGTC |
| NO: 1750 | complement component 4 binding protein beta | TGTGTCCACCTGGTC |
| | (C4BPB), RefSeqGene on chromosome 1 | ATCTGATTTCCTACT |
| | | GCTGCAGGATTCTAA |
| SEQ ID | GI 262331523 NG_013339 Homo sapiens | CTCAGCTTTACTCAA |
| NO: 1751 | catalase | AGCCTCCATGACTTA |
| | (CAT), RefSeqGene on chromosome 11 | GCAGGTTCAGGTTAG |
| | | GCGACCTTCTTAGGT |
| SEQ ID | GI 1028224151 NG_008493 Homo sapiens | AGCGAGGCAAAAGAG |
| NO: 1752 | estrogen receptor 1 | TAGAGATGTTTTAGT |
| | (ESR1), RefSeqGene on chromosome 6 | GAACTAGGCCATGAC |
| | | TTGGGGAGTCTCCAC |
| SEQ ID | GI 225735562 NG_011713 Homo sapiens | TGGTCTTCCAAGTTC |
| NO: 1753 | insulin like growth factor 1 | TCAGTTTCCTGATTT |
| | (IGF1), RefSeqGene on chromosome 12 | GAGTAGCAAGGAGAT |
| | | GGGTCTGGATTCGCT |
| SEQ ID | GI 1142736558 NG_052842 Homo sapiens | AACTCTGAAGAGCAA |
| NO: 1754 | pyruvate dehydrogenase | AAAGGGACAAACACT |
| | phosphatase regulatory subunit | AACTGCTGAGCTGGG |
| | (PDPR), RefSeqGene on chromos [symbol] | CCATTTGATCTCCTT |
| SEQ ID | GI 156523973 NM_001296 Homo sapiens | AGGGCCAGATTCATC |
| NO: 1755 | atypical chemokine receptor 2 | ATTTCAAAGTTACTT |
| | (ACKR2), mRNA | TCTATATGCGGCCGG |
| | | AACAGGGTGGTTGAC |
| SEQ ID | GI 190194362 NM_006426 Homo sapiens | TCGTGAATGACGACC |
| NO: 1756 | dihydropyrimidinase like 4 | AGTCCTTTTACGCTG |
| | (DPYSL4), mRNA | ATGTGCACGTGGAAG |
| | | ATGGCTTGATAAAAC |
| SEQ ID | GI 87046146 DQ142911 Homo sapiens | CTGGAAATCACGTGT |
| NO: 1757 | cogulation factor VII | GTGTAGGTGTGTGGC |
| | (F7) gene, complete cds | ATGTGTATAGGGGTG |
| | | TGTTTATGTGGTGTG |
| SEQ ID | GI 33867482 AY368173 Homo sapiens | CTAACGTGCCTAAGA |
| NO: 1758 | microsomal glutathione S-transferase 1 | TTGGAGGTGACGATA |
| | (MGST1) gene, complete cds | TCTCTGTGATGCTGG |
| | | GGGAGAAATCACAGG |
| SEQ ID | GI 171460912 NG_007496 Homo sapiens | CTCAATGGAAAACGA |
| NO: 1759 | jagged 1 | GCGGAAATAGTGTGG |
| | (JAG1), RefSeqGene on chromosome 20 | GAGGGTAGGAGAGGC |
| | | GATTGATTTGCATTT |
| SEQ ID | GI 1024846744 NG_047021 Homo sapiens | CTGTCCCAGGATAGG |
| NO: 1760 | nudix hydrolase 15 | CAAGTGCTCCTATAC |
| | (NUDT15), RefSeqGene on chromosome 13 | TGACTCTGGCAACAC |
| | | CTTACCAAAAGTCTT |
| SEQ ID | GI 1154491908 NG_052978 Homo sapiens | CCACCACTACAACAA |
| NO: 1761 | pyruvate kinase, muscle | TCAACACAGACTTCT |
| | (PKM), RefSeqGene on chromosome 15 | GTGACCAAATATGTG |
| | | GGGGATTTGCCCTCA |
| SEQ ID | GI 342349297 NG_029616 Homo sapiens | AGAACTTCGTCCAGC |
| NO: 1762 | protein kinase C zeta | TCTACTTTCTGGGGT |
| | (PRKCZ), RefSeqGene on chromosome 1 | CAAGATGAGACCAAG |
| | | CTGTTGGATCTTTGT |
| SEQ ID | GI 294459987 NG_017046 Homo sapiens | AGACAAAGGTGAGAC |
| NO: 1763 | spleen associated tyrosine kinase | TTCCTTTCATTCAAG |
| | (SYK), RefSeqGene on chromosome 9 | GGACATTCACAGAGC |
| | | AAAGTGCGTGGTCAC |
| SEQ ID | GI 480355034 KC485577 Homo sapiens | ATTTGGGCTTACAGC |
| NO: 1764 | bone morphogenenic protein-5 | TCTGTGCAGAAACAG |
| | (BMP5) mRNA, complete cds | GGGATGGACGCAGTA |
| | | TCAACGTAAAATCTG |
| SEQ ID | GI 22122007 AY135686 Homo sapiens | TTTTTGCCGGGAAAG |
| NO: 1765 | growth arrest and | TCGCTACATGGATCA |
| | DNA-damage-inducible, alpha | ATGGGTTCCAGTGAT |
| | (GADD45A) gene, complete cds | TAATCTCCCTGAACG |
| SEQ ID | GI 167887711 EF445033 Homo sapiens | CCACTCCTCCCCCTG |
| NO: 1766 | signal transducing adapter molecule 1 | CAATATTACTGTCTT |
| | (STAM) gene, complete cds, | TAGGTCTTTCCTCTT |
| | alternatively spliced | GGGCTGACATAGAGC |
| SEQ ID | GI 238018096 NG_012212 Homo sapiens | GTAGAGGAGAAGGGG |
| NO: 1767 | C-C motif chemokine ligand 11 | TGTTGCTTGGGCAAA |
| | (CCL11), RefSeqGene on chromosome 17 | ATCCAAGAAGTAGGA |
| | | ATGATCATGCTGCAT |
| SEQ ID | GI 262331528 NG_013342 Homo sapiens | GAAGCTTAGCATAAG |
| NO: 1768 | dihydrolipoamide S-acetyltransferase | GCAGGTGGTACTATG |
| | (DLAT), RefSeqGene on chromosome 11 | GATTTCCTCCTCTTG |
| | | AGGGACTGTGGTGTC |
| SEQ ID | GI 1028224165 NG_047209 Homo sapiens | GAGTCAATCACTACT |
| NO: 1769 | interleukin 33 | CTCAGCAAGCAGCCT |
| | (IL33), RefSeqGene on chromosome 9 | TAACTGGGAATCCTC |
| | | AAAGGGGCATTTGTG |
| SEQ ID | GI 319655745 NG_028087 Homo sapiens | ATAAATGGCTTACGT |
| NO: 1770 | toll like receptor 6 | AACTGCTGCCATCCA |
| | (TLR6), RefSeqGene on chromosome 4 | CACTGTCAAACCATG |
| | | ATGGGCAACCTAAGT |
| SEQ ID | GI 319655745 NG_028087 Homo sapiens | TTCCAGCCCTGAGAA |
| NO: 1771 | toll like receptor 6 | AGTTCTAAGGTGTAC |
| | (TLR6), RefSeqGene on chromosome 4 | AAAACAAAGGCAAGC |
| | | CCCTGAGTGTGAATC |
| SEQ ID | GI 70995318 NM_002506 Homo sapiens | AGCTTTCTATCCTGG |
| NO: 1772 | nerve growth factor | CCACACTGAGGTGCA |
| | (NGF), mRNA | TAGCGTAATGTCCAT |
| | | GTTGTTCTACACTCT |
| SEQ ID | GI 1049010774 AH002843 Homo sapiens | CAGCCTTCTCTGTGT |
| NO: 1773 | interleukin 2 receptor gamma chain | GTATTTCTGGCTGGA |
| | (IL2RG) gene, complete cds | ACGGTGAGATTTGGA |
| | | GAAGCCCAGAAAAAT |
| SEQ ID | GI 224809269 NG_011475 Homo sapiens | CCTGGACCTGTGATG |
| NO: 1774 | toll like receptor 4 | ATTAGGGCTGAATAA |
| | (TLR4), RefSeqGene on chromosome 9 | CGGTGTCTACTTGGG |
| | | TGTAAAAGCCAGGTA |
| SEQ ID | GI 68303552 NM_005165 Homo sapiens | GTGCCTATTGTGGAA |
| NO: 1775 | aldolase, fructose-bisphosphate C | CCTGAAATATTGCCT |
| | (ALDOC), mRNA | GATGGAGACCACGAC |
| | | CTCAAACGTTGTCAG |
| SEQ ID | GI 70995318 NM_002506 Homo sapiens | CGGGGCATTGACTCA |
| NO: 1776 | nerve growth factor | AAGCACTGGAACTCA |
| | (NGF), mRNA | TATTGTACCACGACT |
| | | CACACCTTTGTCAAG |
| SEQ ID | GI 2735714 AF004877 Homo sapiens | GGTATAGGAGCTCCA |
| NO: 1777 | pro-alpha 2(1) collagen | AGGACAAGAAACACG |
| | (COL1A2) gene, complete cds | TCTGGCTAGGAGAAA |
| | | CTATCAATGCTGGCA |
| SEQ ID | GI 32187524 AY324387 Homo sapiens | AGTAGGCAGCAAAGC |
| NO: 1778 | glutathione S-transferase pi | CAAAGAAAATAGCCT |
| | (GSTP1) gene, complete cds | AAGGCACAGCCACTA |
| | | AAAGGAACGTGATCA |
| SEQ ID | GI 40786798 AY518533 Homo sapiens | TAGTGTGTTGAAGGA |
| NO: 1779 | interleukin 17 receptor B | AAATGGGGACAGTGT |
| | (1L17RB) gene, complete cds | TGTCCAAACGTGCTG |
| | | GGCTACTTTGATGAA |
| SEQ ID | GI 3403164 AFO27148 Homo sapiens | GGATGGTGACACTAG |
| NO: 1780 | myogenic determining factor 3 | GGATGGACTGACTTG |
| | (MYOD1) gene, complete cds | AGACAGGTCTTAGAG |
| | | GTAGAATGGACAGCT |
| SEQ ID | GI 1025608652 NG_047034 Homo sapiens | TAAAGGGACTGCAGT |
| NO: 1781 | autocrine motility factor receptor | GTGAAGGTGACCTAC |
| | (AMFR), RefSeqGene on chromosome 16 | TGAATAAAGGTGGCT |
| | | CCCTTACCTGTGTTT |
| SEQ ID | GI 374349244 NG_032042 Homo sapiens | CCTGAAGGAGATTAA |
| NO: 1782 | annexin A5 | GAGTTGGAAGGCTGT |
| | (ANXA5), RefSeqGene on chromosome 4 | CAGCAACCCACATTT |
| | | TCACAGCTTGGAACT |
| SEQ ID | GI 365192584 NG_031951 Homo sapiens | TCCCAGGATAGGTGA |
| NO: 1783 | prostate transmembrane | AAGGGTTAAAATGAG |
| | protein, androgen induced 1 | TAAAGCAGTTGAGCA |
| | (PMEPA1), RefSeqGene on chromoso [symbol] | AACACCAACCCGAGC |
| SEQ ID | GI 229577394 NG_011993 Homo sapiens | AAGTTTGCTTTGATT |
| NO: 1784 | thymocyte selection associated | GGTGGGACCAGTCTT |
| | high mobility group box | GCCCTTGACCTTATC |
| | (TOX), RefSeqGene on chromosome [symbol] | TTAGAGGTTGAAGGC |
| SEQ ID | GI 75677324 NM_014238 Homo sapiens | CTGGGAGTCATGTTT |
| NO: 1785 | kinase suppressor of ras 1 | CTCTTCTCTCTCAGT |
| | (KSR1), mRNA | TCTACTTGGAGCAAG |
| | | AGCTTTCCTGGGCTG |
| SEQ ID | GI 156546893 NM_001101802 Homo sapiens | GAGCGAAAAAGAAGA |
| NO: 1786 | PHD finger protein 21A | ACAACAGCAAATCCG |
| | (PHF21A), transcript variant 1, mRNA | GTCTACAGTGGAGCA |
| | | GTCTTTGAGCCAGAG |
| SEQ ID | GI 14278707 AF365976 Homo sapiens | GATCTATACTGAATC |
| NO: 1787 | interleukin 3 | CCCCAGTCCTCGGGG |
| | (IL3) gene, complete cds | TCTTCTGGACCTTGT |
| | | CCATATCCTTAGGAC |
| SEQ ID | GI 324021724 NG_028154 Homo sapiens | AATGTTAACCCGGTT |
| NO: 1788 | fatty acid binding protein 5 | GCTCGCTGGTGAAAT |
| | (FABP5), RefSeqGene on chromosome 8 | AACTACCGTGACCCT |
| | | CTATTGATACCTGGT |
| SEQ ID | GI 224809429 NG_011538 Homo sapiens | GGTTCAGGCTGTTCT |
| NO: 1789 | potassium voltage-gated channel | TGCCTCTCCTTGGTG |
| | interacting protein 1 | TGTCAGAGTAGAGGA |
| | (KCNIP1), RefSeqGene on chromoso [symbol] | GAAATGACTTTCAGT |
| SEQ ID | GI 344925847 NG_029819 Homo sapiens | ACCTAACAGAGAAAG |
| NO: 1790 | prolactin | CAGATGTGGTCAGTT |
| | (PRL), RefSeqGene on chromosome 6 | CCTGCAACTTTTCTT |
| | | CCGCCTCTCTCTTCT |
| SEQ ID | GI 48772828 AY618665 Homo sapiens | TATGGCTGGTACATC |
| NO: 1791 | VIMP mRNA, complete cds | GTCTTCAGCTGCATC |
| | | CTTCTCTACGTGGTC |
| | | TTTCAGAAGCTTTCC |
| SEQ ID | GI 343488501 NG_029726 Homo sapiens | GAGGTATGGTCATTT |
| NO: 1792 | dynamin 1 | GTGCACAGCCACACA |
| | (DNM1), RefSeqGene on chromosome 9 | GCTCCTACATGACAG |
| | | CTCAGACATTCAATG |
| SEQ ID | GI 908212441 NG_042288 Homo sapiens | TGGGACAGTGGCTTG |
| NO: 1793 | methylsterol monooxygenase 1 | GAAGAGGTAATGGAG |
| | (MSM01), RefSeqGene on chromosome 4 | GCTAGGAAGGTGTTT |
| | | ATCAACAAAGGAAGA |
| SEQ ID | GI 341572553 NG_029518 Homo sapiens | GAGGCTTCACACAGG |
| NO: 1794 | sestrin 1 | GTTTGGCTAACTTGC |
| | (SESN1), RefSeqGene on chromosome 6 | CTTTGTTCGACTGTC |
| | | TTCTGTCATGTAAGG |
| SEQ ID | GI 194353939 NG_008255 Homo sapiens | AGTGAATGGCATCAA |
| NO: 1795 | solute carrier family 19 member 2 | GGTACAAAATGGTGG |
| | (SLC19A2), RefSeqGene on chromosome 1 | CATTGTTACTGACAC |
| | | CCCAGCTTCTAACCA |
| SEQ ID | GI 149408121 NM_024119 Homo sapiens | CCACACGCACAAGGA |
| NO: 1796 | DExH-box helicase 58 | CACCGTCTACAACGT |
| | (DHX58), mRNA | CATCATGAGCCAGTA |
| | | CCTAGAACTTAAACT |
| SEQ ID | GI 1036029697 AH005415 Homo sapiens | ACTTCTTTGCCTTCA |
| NO: 1797 | bradykinin B1 receptor | CTAACAGCTCCCTGA |
| | (BDKRB1) gene, complete cds | ATCCAGTAATTTATG |
| | | TCTTTGTGGGCCGGC |
| SEQ ID | GI 84872755 DQ355026 Homo sapiens | CAAGTGAGAGGCAGA |
| NO: 1798 | caspase 8, apoptosis- | GCTGGGATTTGAATC |
| | related cysteine peptidase | CAGATCTGCCTGATA |
| | (CASP8) gene, complete cds | CTGAAGTCTAGGCTG |
| SEQ ID | GI 3169541 AF043105 Homo sapiens | GGTACTGATGGACTT |
| NO: 1799 | glutathione S-transferase mu 3 | AACCGGAGTTCGGAA |
| | (GSTM3) gene, complete cds | ACCGTCCTGTGTACA |
| | | CATGGGAGTTTAGTG |
| SEQ ID | GI 14278707 AF365976 Homo sapiens | GCAAGACTGGAAATC |
| NO: 1800 | interleukin 3 | TGTCTCCTCACAAGA |
| | (IL3) gene, complete cds | CTGAGCTGCTAGTGG |
| | | AGGTTACCATGTCTG |
| SEQ ID | GI 1025812271 NG_047045 Homo sapiens | CTTCAACAACAGCTT |
| NO: 1801 | activating transcription factor 2 | TTAGTCAGCACTTCC |
| | (ATF2), RefSeqGene on chromosome 2 | CAGCCATGGAGACTC |
| | | CAGGATCTCCTCTTA |
| SEQ ID | GI 340523111 NG_029470 Homo sapiens | CCTTATCCAACCCTG |
| NO: 1802 | enolase 1 | AAGTTCCCTATCTGG |
| | (ENO1), RefSeqGene on chromosome 1 | CTGGAGACCCTCTTT |
| | | CACAAAGATCCCTTT |
| SEQ ID | GI 612339390 NG_034111 Homo sapiens | AACCCCTATGACCCC |
| NO: 1803 | goosecoid homeobox | TCGCCTTCCGTAACT |
| | (GSC), RefSeqGene on chromosome 14 | AAAATAGGCATGGTC |
| | | ATAGTGTCTGTTTCC |
| SEQ ID | GI 210032106 NG_008851 Homo sapiens | AAGCTCAAGGTTTCT |
| NO: 1804 | interleukin 1 beta | GACCTGTATCCCAAG |
| | (ILIB), RefSeqGene on chromosome 2 | TCCCAGAAGCAGAAT |
| | | GGACTAACTCAGAGC |
| SEQ ID | GI 209447063 NG_008722 Homo sapiens | AAAAACCAAGGGACA |
| NO: 1805 | lysyl oxidase | TCAGATTTCTTACCC |
| | (LOX), RefSeqGene on chromosome 5 | AGCCGACCAAGATAT |
| | | TCCTGGGAATGGCAC |
| SEQ ID | GI 874507491 NG_042218 Homo sapiens | CATGAACTGAGGGAC |
| NO: 1806 | surfactant protein D | CTCTATGACATTGGG |
| | (SFTPD), RefSeqGene on chromosome 10 | CAGGGCTTCAAAGGG |
| | | ATCAGATACAGTCTT |
| SEQ ID | GI 392050748 NM_001267774 Homo sapiens | GTAGTAGGCACTCAA |
| NO: 1807 | intraflagellar transport 20 | GAAATGTGTGTTGAA |
| | (IFT20), transcript variant 1, mRNA | TGAACGATGCCTGTG |
| | | ACAAGCAAGCGGACT |
| SEQ ID | GI 1041818013 NM_006065 Homo sapiens | AAGAAGGCCACTTCC |
| NO: 1808 | signal regulatory protein beta 1 | CACGGGTAACAACTG |
| | (SIRPB1), transcript variant 1, mRNA | TTTCAGAACTCACAA |
| | | AGAGAAACAACCTGG |
| SEQ ID | GI 187960074 NG_007666 Homo sapiens | GCAGGGTTTGCCTGA |
| NO: 1809 | HRas proto-oncogene, GTPase | CTGTAAAACGCCTTT |
| | (HRAS), RefSeqGene on chromosome 11 | TTTGTTTTGAGACGA |
| | | AGTAGCGCTCTGTTG |
| SEQ ID | GI 237874160 NG_012149 Homo sapiens | GGGTCCTTGAGATCT |
| NO: 1810 | isocitrate dehydrogenase 3 | CCTTGGCATCCACTC |
| | (NAD(+)) beta | CCATTTCCTATCTGG |
| | (IDH3B), RefSeqGene on chromosome 20 | GACTTCATTATCACC |
| SEQ ID | GI 55770831 NM_001802 Homo sapiens | TCAGAGCATCCATTT |
| NO: 1811 | cerebellar degeneration related protein 2 | GTGAATGGAGTTGAG |
| | (CDR2), mRNA | AAGCTGGTGCCAGAC |
| | | TCTCTGTATGTTCCT |
| SEQ ID | GI 190194395 NG_008003 Homo sapiens | TTCTTCCTCGTTTCT |
| NO: 1812 | acyl-CoA dehydrogenase, | GGTTTTCTCACCATT |
| | short/branched chain | CAGTCGCTCGCATTT |
| | (ACADSB), RefSeqGene on chromosome 10 | CTGGTTCCCTTTTCC |
| SEQ ID | GI 255652920 NG_012644 Homo sapiens | AATGAGGACGGTTAG |
| NO: 1813 | deleted in malignant brain tumors 1 | TCACCCTACAAGTGG |
| | (DMBT1), RefSeqGene on chromosome 10 | CAGATGCTGTGATTG |
| | | GTCCTTGTCATACTC |
| SEQ ID | GI 341823675 NG_029547 Homo sapiens | GTCACTTTGGCATCC |
| NO: 1814 | interleukin 5 receptor subunit alpha | TCTGATGAACTCACA |
| | (IL5RA), RefSeqGene on chromosome 3 | CATGCCTCAGTGCCT |
| | | CAGTGAAAAGAACAG |
| SEQ ID | GI 209977115 NM_153692 Homo sapiens | CATTTAGGAGGGTTT |
| NO: 1815 | HtrA serine peptidase 4 | GCAGGTCCAGAGTAA |
| | (HTRA4), mRNA | AGTCACTGAAGAGTG |
| | | GAAGCGAGGAAGGAA |
| SEQ ID | GI 111161293 NM_005746 Homo sapiens | CTGTTCCTGAGGGCT |
| NO: 1816 | nicotinamide phosphoribosyltransferase | TTGTCATTCCCAGAG |
| | (NAMPT), mRNA | GAAATGTTCTCTTCA |
| | | CGGTGGAAAACACAG |
| SEQ ID | GI 188219598 NM_004688 Homo sapiens | CAACGGGCAAAGAAT |
| NO: 1817 | N-myc and STAT interactor | GGAGGTGGAGAAGTA |
| | (NMI), mRNA | GATGTGGTCAAGTGT |
| | | TCTCTAGGTCAACCT |
| SEQ ID | GI 28932927 AY245248 Homo sapiens | CCAGTCATATGCTGT |
| NO: 1818 | BCL2-interacting killer | CTTTTTGCCCCAGAG |
| | (apoptosis-inducing) | GAGAAATGTCTGAAG |
| | (BIK) gene, complete cds | TAAGACCCCTCTCCA |
| SEQ ID | GI 46361513 AY594694 Homo sapiens | TCTGAGTTTTGACAT |
| NO: 1819 | interferon gamma receptor 1 | CTTGCAGCCTCCTCC |
| | (IFNGR1) gene, complete cds | ATTCTAACAAAATGC |
| | | CAGGGAAAGGCTCTG |
| SEQ ID | GI 77744386 DQ230907 Homo sapiens | AGGAAACAGATCATA |
| NO: 1820 | nudix | GAAGCCTGTGGTTTC |
| | (nucleoside diphosphate linked | ATCCTGTGTTCTCAG |
| | moiety X)-type motif 1 | AGAAGAGGCACCAGG |
| | (NUDT1) gene, complete cds | |
| SEQ ID | GI 32263624 AY325800 Homo sapiens | TTCTCTGAGCCACCA |
| NO: 1821 | stannin | ATTTCTGTATCTGCC |
| | (SNN) gene, complete cds | AAGAGGGAACAGTAA |
| | | TAGCTCAACTGCCCT |
| SEQ ID | GI 383087750 NG_015839 Homo sapiens | CTCCAGAATCGATCC |
| NO: 1822 | ERCC excision repair 1, | CTACTACCTCCTAGT |
| | endonuclease non-catalytic subunit | CCAAGTCACCATTGG |
| | (ERCC1), RefSeqGene on chromo [symbol] | ACTCAACTGGACCAT |
| SEQ ID | GI 226491119 NG_011810 Homo sapiens | TCAGATATGGTGAGG |
| NO: 1823 | 1,4-alpha-glucan branching enzyme 1 | GGAAGAACATGGTGA |
| | (GBE1), RefSeqGene on chromosome 3 | GGGAAAGACCATGAA |
| | | CCCATGGATAGCATC |
| SEQ ID | GI 224809344 NG_011510 Homo sapiens | CGGAAGTCACACACA |
| NO: 1824 | lanosterol synthase | GCATCCTCCCCCACC |
| | (LSS), RefSeqGene on chromosome 21 | ACAGTGGAGTTAAAC |
| | | TGAATTGAAAATCAG |
| SEQ ID | GI 645912997 NG_034139 Homo sapiens | TCCCCAGCACCATTT |
| NO: 1825 | MHC class 1 polypeptide- | TTGAAGAGACTCTCC |
| | related sequence A | TTTGCCAATGTGTGT |
| | (MICA), RefSeqGene on chromosome 6 | TCTTGGTACCTTTGT |
| SEQ ID | GI 209447065 NG_008724 Homo sapiens | TGGCACCACTCACAC |
| NO: 1826 | NLR family apoptosis inhibitory protein | ATGATCACATTATCA |
| | (N AIP), RefSeqGene on chromosome 5 | TGTGACTAGCACCTA |
| | | CTAGAGCCGCACATC |
| SEQ ID | GI 269914179 NG_015979 Homo sapiens | ATGTTAGTCAAGACC |
| NO: 1827 | nitric oxide synthase 1 adaptor protein | TAAGCAGAGGTGGAA |
| | (NOSIAP), RefSeqGene on chromosome 1 | GCACGAGCTTTTCTG |
| | | TCCTACATGCTCCTG |
| SEQ ID | GI 226693341 NG_011851 Homo sapiens | ATAAACACGATTTCC |
| NO: 1828 | synuclein alpha | CTCCATCACTAACTT |
| | (SNCA), RefSeqGene on chromosome 4 | CATCTGCAGGGCCTA |
| | | AGCCTCCTTCACAGT |
| SEQ ID | GI 215598755 NG_009072 Homo sapiens | TACTACACAGGGAAC |
| NO: 1829 | von Willebrand factor | TGGGATTCCTGGCTG |
| | (VWF), RefSeqGene on chromosome 12 | GCAGTAGGAGTTCTT |
| | | GAGTTTTATTGCCAA |
| SEQ ID | GI 206597534 NM_001639 Homo sapiens | TTGGATCAATGGGAC |
| NO: 1830 | amyloid P component, serum | ACCTTTGGTGAAAAA |
| | (APCS), mRNA | GGGTCTGCGACAGGG |
| | | TTACTTTGTAGAAGC |
| SEQ ID | GI 343962631 NM_002037 Homo sapiens | AACCCGCTAAACTTT |
| NO: 1831 | FYN proto-oncogene, Src | CTCATGCAACTAAAA |
| | family tyrosine kinase | TTTCTGGGGGAAATG |
| | (FYN), transcript variant 1, mRNA | AGGGTGGGGGTTGTA |
| SEQ ID | GI 45238846 NM_006142 Homo sapiens | GATTGAGGGAAAGCA |
| NO: 1832 | stratifin | TGTCTGCTGGGTGTG |
| | (SFN), mRNA | ACCATGTTTCCTCTC |
| | | AATAAAGTTCCCCTG |
| SEQ ID | GI 117606559 EF064754 Homo sapiens | CAGGCTCTGAGCCAA |
| NO: 1833 | CD40 molecule, TNF receptor | ACACTGCCTGTTTTC |
| | superfamily member 5 | TTTGTCTGATTTCTC |
| | (CD40) gene, complete cds | ACAACTCCCCCATTA |
| SEQ ID | GI 237649059 NG_012020 Homo sapiens | ACACGAGTATCTGCT |
| NO: 1834 | adrenoceptor alpha 2A | TTAGGAAGATTTCTG |
| | (ADRA2A), RefSeqGene on chromosome 10 | CAACACGGCAGGGTG |
| | | CAATTCAAACTCTGG |
| SEQ ID | GI 238018064 NG_012194 Homo sapiens | GATGTTTGAGCTAGG |
| NO: 1835 | cytochrome b5 reductase 3 | CTCTGAGGAATGAAT |
| | (CYB5R3), RefSeqGene on chromosome 22 | AGGAGTTTGCTGGTT |
| | | GGATGCATGCAGAGC |
| SEQ ID | GI 209447083 NG_008732 Homo sapiens | GGTCCATTTGAATCC |
| NO: 1836 | vascular endothelial growth factor A | AAAGTCCCTGTACTT |
| | (VEGFA), RefSeqGene on chromosome 6 | TCCACTGCCCTACCT |
| | | AGATGTCCCTGTACC |
| SEQ ID | GI 109637772 NM_015247 Homo sapiens | GGACCCCTGTTAGCA |
| NO: 1837 | CYLD lysine 63 deubiquitinase | GAGAGGACAGTCTCC |
| | (CYLD), transcript variant 1, mRNA | GGAATATTCTTTGGA |
| | | GTTGAATTGCTGGAA |
| SEQ ID | GI 372466583 NM_005239 Homo sapiens | GCCAACAGGCTTGGA |
| NO: 1838 | ETS proto-oncogene 2, | TTCCATTTCTCATGA |
| | transcription factor | CTCCGCCAACTGTGA |
| | (ETS2), transcript variant 1, mRNA | ATTGCCTTTGTTAAC |
| SEQ ID | GI 58530885 NM_001570 Homo sapiens | CGAAAGATTCTTCCA |
| NO: 1839 | interleukin 1 receptor associated kinase 2 | GGCAGAGTTGCAGAT |
| | (IRAK2), mRNA | TTGTCTTAGATGCTG |
| | | CCACCCCAATGTCTT |
| SEQ ID | GI 164692857 AK313058 Homo sapiens | TTCTCTACGCCTTTC |
| NO: 1840 | cDNA, FU93535, Homo sapiens | TTGATGAAAACTTCA |
| | opioid receptor, kappa 1 | AGCGGTGTTTCCGGG |
| | (OPRK1), mRNA | ACTTCTGCTTTCCAC |
| SEQ ID | GI 281485607 NM_003226 Homo sapiens | AGGATATTTTGAATC |
| NO: 1841 | trefoil factor 3 | CAGACTGGCACCCAC |
| | (TFF3), mRNA | GTCACAGGAAAGCCT |
| | | AGGAACACTGTAAGT |
| SEQ ID | GI 71648775 DQ143945 Homo sapiens | GTGGCTGTGAAGCTC |
| NO: 1842 | adrenomedullin | AAAGTAGACTGGGAT |
| | (ADM) gene, complete cds | GTGGCCGTGCTTGGT |
| | | AAACTGTAAAATGAT |
| SEQ ID | GI 22788696 AF511593 Homo sapiens | TCCCAGAGTCATCTG |
| NO: 1843 | cyclin D1 | ATTGGACAGGCATGG |
| | (PRAD1: parathyroid adenomatosis 1) | GTGCAAGGAAAATTA |
| | (CCND1) gene, complete cds | GGGTACTCAACCTAA |
| SEQ ID | GI 10799005 AF261108 Homo sapiens | TAGGGAGTGTGATCT |
| NO: 1844 | type XV collagen | TAGAGAGCAGAAGTG |
| | (COL15A1) gene, promoter | AAAAGGAAAGGGAGG |
| | sequence and exon 1, | CGAGGTAGGAGGAAG |
| SEQ ID | GI 170763484 NG_007481 Homo sapiens | ACACCTGAGTCTGTT |
| NO: 1845 | complement C3b/C4b receptor 1 | TGCTCTTCTGTAAAA |
| | (Knops blood group) | TGGGGACACTGGTAT |
| | (CR1), RefSeqGene on chromosome 1 [symbol] | CTCTGCATCGTGGAG |
| SEQ ID | GI 238018064 NG_012194 Homo sapiens | GTTGTCCACCCATTT |
| NO: 1846 | cytochrome b5 reductase 3 | TACAGATGGAGAAAG |
| | (CYB5R3), RefSeqGene on chromosome 22 | CAAGGTGATGTCTCT |
| | | TGCTAAGGCCACCAG |
| SEQ ID | GI 1015224512 NG_023402 Homo sapiens | GGAGACTTTGAGTTT |
| NO: 1847 | Janus kinase 1 | TCTGTGGGTGTAAGT |
| | (JAK1), RefSeqGene on chromosome 1 | TTTGCAAATGGTCCT |
| | | GGTAGCCCTGAAGCT |
| SEQ ID | GI 584458486 NG_012245 Homo sapiens | GTACTGGTGTTTAGG |
| NO: 1848 | N-acetyltransferase 1 | TTGTACTCTGGGGGA |
| | (NAT1), RefSeqGene on chromosome 8 | GATAGCTGCTAGAAG |
| | | TTGGCCCAATTGTGT |
| SEQ ID | GI 238776810 NG_012247 Homo sapiens | AGACTGTCAGTCATC |
| NO: 1849 | solute carrier family 25 member 13 | CTCCTGGAGAAGGCA |
| | (SLC25A13), RefSeqGene on chromosome 7 | TCCTAATTGGCCAGC |
| | | TCTATTTTTGGTAGC |
| SEQ ID | GI 49574519 NM_052972 Homo sapiens | GGGTCCGCTGCAATT |
| NO: 1850 | leucine rich alpha-2-glycoprotein 1 | AGAACGGCTACATCT |
| | (LRG1), mRNA | AGAAGGCAACAAATT |
| | | GCAAGTACTGGGAAA |
| SEQ ID | GI 27501935 AY207429 Homo sapiens | TTACACAATCCTCCT |
| NO: 1851 | interleukin 11 | GGACTCTTGAATACG |
| | (ILH) gene, complete cds | CCCTGTTTTACAGGC |
| | | GAGGGAAACTGAGTC |
| SEQ ID | GI 334085198 NG_029002 Homo sapiens | AACTTTAGCTGCCCA |
| NO: 1852 | BCL2 like 1 | TCAGAATCACCTGGA |
| | (BCL2L1), RefSeqGene on chromosome 20 | AGGTTTGTTAAACCT |
| | | CAGATTGCTGGGCTC |
| SEQ ID | GI 834400736 NG_042182 Homo sapiens | TGAGCCCTCAAAGAC |
| NO: 1853 | eomesodermin | CCAGACTTTTACCTT |
| | (EOMES), RefSeqGene on chromosome 3 | CTCAGAAACGCAATT |
| | | CATTGCAGTGACTGC |
| SEQ ID | GI 319803083 NG_011853 Homo sapiens | TGGAGGCTGTGGCTT |
| NO: 1854 | galactosylceramidase | TTTCCTTTTTCATCC |
| | (GALC), RefSeqGene on chromosome 14 | TCAGGTTGTTTTGGG |
| | | GAGACCTTAAGTCTG |
| SEQ ID | GI 176866166 NG_007524 Homo sapiens | TAGTACATGAGATAG |
| NO: 1855 | KRAS proto-oncogene, GTPase | GCTGTGGGTGGCAAG |
| | (KRAS), RefSeqGene on chromosome 12 | GTTTCTTGAGAAAGT |
| | | GAGGGATGCACAGTT |
| SEQ ID | GI 1154491908 NG_052978 Homo sapiens | ATTGTCGCACGTAAC |
| NO: 1856 | pyruvate kinase, muscle | ACACAGATAATCCCC |
| | (PKM), RefSeqGene on chromosome 15 | TTCCCCCATGTACCT |
| | | ACACAAAGCCATACT |
| SEQ ID | GI 342672042 NG_029626 Homo sapiens | GCAATGAGTCTTGCC |
| NO: 1857 | synaptosome associated protein 25 | TCACTCACAGTAGAG |
| | (SNAP25), RefSeqGene on chromosome 20 | GCACTAGCAGAAGAG |
| | | GCCTTCAGAATACAC |
| SEQ ID | GI 110349787 NM_018489 Homo sapiens | AGAACGATTTCGAGC |
| NO: 1858 | ASH1 like histone lysine | TGAGGAAAAAGGTTG |
| | methyltransferase | GGGAATCAGAACCAA |
| | (ASHIL), mRNA | AGAGCCCCTAAAAGC |
| SEQ ID | GI 20147702 AF493905 Homo sapiens | GGATTCATTGCTTCG |
| NO: 1859 | guanine nucleotide binding | AAGGAGTGACGGCGA |
| | protein alpha il | TCATCTTCTGTGTAG |
| | (GNAIl) mRNA, complete cds | CACTGAGTGACTACG |
| SEQ ID | GI 954169997 NM_002177 Homo sapiens | CCCTTTCTTGTGTCT |
| NO: 1860 | interferon omega 1 | CAAGGACAGAAGAGA |
| | (IFNW1), mRNA | CTTCAGGTTCCCCCA |
| | | GGAGATGGTAAAAGG |
| SEQ ID | GI 54112083 AY771996 Homo sapiens | CAACGGCTGGTTATT |
| NO: 1861 | interleukin 12 receptor, beta 1 | AAGCACTTATGGCAT |
| | (IL12RB1) gene, complete cds | ACCCAGCCCATTCCA |
| | | TCCACTCACATGATT |
| SEQ ID | GI 193290109 NG_008150 Homo sapiens | AGATTGATGTGATTA |
| NO: 1862 | checkpoint kinase 2 | CTTTTCGAACACTTG |
| | (CHEK2), RefSeqGene on chromosome 22 | TCATGCCAGTTGTCT |
| | | TGTGGACCCCGGCAG |
| SEQ ID | GI 340805836 NG_029500 Homo sapiens | ATCTCTGCTGCTTAA |
| NO: 1863 | fatty acid binding protein 6 | TAGCTGGACGACCTT |
| | (FABP6), RefSeqGene on chromosome 5 | AGACAGCCTTCCTAA |
| | | CCTCTCTGAGCTCAA |
| SEQ ID | GI 237858748 NG_012115 Homo sapiens | TAAGCCACTGAGAGC |
| NO: 1864 | phospholipid transfer protein | TGGGGTCTGTCTTTG |
| | (PLTP), RefSeqGene on chromosome 20 | TTAATGCATGCCAAA |
| | | GTGCTTTGGTAAAGT |
| SEQ ID | GI 75709215 NM_181866 Homo sapiens | AATTTTCATGACAAG |
| NO: 1865 | acyl-CoA thioesterase 7 | ATCAGAAAAGGCTGC |
| | (ACOT7), transcript variant hBACHd, mRNA | GTCATCACCATCTCG |
| | | GGACGCATGACCTTC |
| SEQ ID | GI 685844874 NM_002988 Homo sapiens | ACCAACAAAGAGCTC |
| NO: 1866 | C-C motif chemokine ligand 18 | TGCTGCCTCGTCTAT |
| | (CCL18), mRNA | ACCTCCTGGCAGATT |
| | | CCACAAAAGTTCATA |
| SEQ ID | GI 194733730 NM_002993 Homo sapiens | CTACATGGATTCCCT |
| NO: 1867 | C-X-C motif chemokine ligand 6 | ACTTTGAAGAGTGTG |
| | (CXCL6), mRNA | GGGGAAAGCCTACGC |
| | | TTCTCCCTGAAGTTT |
| SEQ ID | GI 345110626 NM_002001 Homo sapiens | AAGAGAACCAGGAAA |
| NO: 1868 | Fc fragment of IgE receptor la | GGCTTCAGACTTCTG |
| | (FCER1A), mRNA | AACCCACATCCTAAG |
| | | CCAAACCCCAAAAAC |
| SEQ ID | GI 378404896 NM_001256796 Homo sapiens | CTTCTAAACTTGGAT |
| NO: 1869 | purinergic receptor P2X 4 | TCCGGATCTGGGATG |
| | (P2RX4), transcript variant 1, mRNA | TGGCGGATTATGTGA |
| | | TACCAGCTCAGGAGG |
| SEQ ID | GI 289666799 NG_016606 Homo sapiens | AGTGCTTTCTAATAA |
| NO: 1870 | glycerol-3-phosphate dehydrogenase 2 | CTCGCATGGTTGTTG |
| | (GPD2), RefSeqGene on chromosome 2 | GACTGAGGTCTCTGT |
| | | TCCTCACCACCTGTT |
| SEQ ID | GI 238018116 NG_012218 Homo sapiens | ATAAACTTTCTAGCG |
| NO: 1871 | hexose-6-phosphate dehydrogenase/ | CATTTTGAGAGAGGG |
| | glucose 1-dehydrogenase | CTTTCTTGGGTGAGG |
| | (H6PD), RefSeqGene on chro [symbol] | GAGCATGGCAAAGTC |
| SEQ ID | GI 340745281 NG_029473 Homo sapiens | AAGATTATTCAGAAG |
| NO: 1872 | heat shock protein family A | GTCGGGGATGGAGCT |
| | (Hsp70) member 8 | AAGCTGCCACCTGGT |
| | (HSPA8), RefSeqGene on chromosome 11 | TAATTAAGGTCCCAA |
| SEQ ID | GI 345525590 NG_029936 Homo sapiens | ACCTCTCCAGGCTGA |
| NO: 1873 | mitogen-activated protein kinase 3 | AACCTCATCATTTTT |
| | (MAPK3), RefSeqGene on chromosome 16 | TTACTGCAGCCATGC |
| | | TGGACAAGTTATGCT |
| SEQ ID | GI 334883167 NG_029059 Homo sapiens | TCCAGGGATCCCTGG |
| NO: 1874 | mitogen-activated protein kinase 9 | TTCCTTTTATGGCGA |
| | (MAPK9), RefSeqGene on chromosome 5 | ATGACATTAGAGAAC |
| | | AAGATCTGGGCTCTG |
| SEQ ID | GI 170014716 NG_007462 Homo sapiens | CGGAACCCAAGCTTA |
| NO: 1875 | tumor necrosis factor | GAACTTTAAGCAACA |
| | (TNF), RefSeqGene on chromosome 6 | AGACCACCACTTCGA |
| | | AACCTGGGATTCAGG |
| SEQ ID | GI 209364548 NM_001912 Homo sapiens | AACATTTGATCACAG |
| NO: 1876 | cathepsin L | TTTAGAGGCACAGTG |
| | (CTSL), transcript variant 1, mRNA | GACCAAGTGGAAGGC |
| | | GATGCACAACAGATT |
| SEQ ID | GI 156104861 NM_181712 Homo sapiens | AGGAAGAGGAAATCA |
| NO: 1877 | KN motif and ankyrin repeat domains 4 | AAGCTAGGGAGCAAA |
| | (KANK4), transcript variant 1, mRNA | GAATTCGAGAGCTGG |
| | | AGTTCACTGTAGCCC |
| SEQ ID | GI 14518294 AF390905 Homo sapiens | TGACTCTACAGACAA |
| NO: 1878 | interleukin 19 | GCTCTATTCTTCCGT |
| | (IL19) gene, complete cds | GGCTGCTCCCACCTG |
| | | AGTTTACTCATCTGA |
| SEQ ID | GI 45505189 AY572796 Homo sapiens | TGAAATCAGGTGGAA |
| NO: 1879 | signal transducer and | ATGACATCTCGCCGC |
| | activator of transcription 3 | TTTCAGCATGCTCTA |
| | (acute-phase response factor) | TTGGTTGGAACAGTT |
| | (STAT3) gene, c [symbol] | |
| SEQ ID | GI 1024336747 NG_046907 Homo sapiens | CAGGGAAATTGAGGG |
| NO: 1880 | acetyl-CoA carboxylase beta | CATCATTGTCATGCG |
| | (ACACB), RefSeqGene on chromosome 12 | CCTTGCCATTCTACC |
| | | ATCTTCTTAAGTGGA |
| SEQ ID | GI 197116377 NG_008385 Homo sapiens | CCTAAAGGCTGCCTG |
| NO: 1881 | cytochrome P450 family | CATTCCTTGGCTCAT |
| | 2 subfamily C member 9 | GAACTCTTCCTTCTT |
| | (CYP2C9), RefSeqGene on chromosome 10 | TCACTCCAAACACTT |
| SEQ ID | GI 297515495 NG_021405 Homo sapiens | AGATGTCCCAATGAC |
| NO: 1882 | MHC class 1 polypeptide- | TAAGAATGTGCGCTG |
| | related sequence B | GGGACAAGCCAATTC |
| | (MICB), RefSeqGene on chromosome 6 | TCTTAGTAGAGGCTT |
| SEQ ID | GI 343887349 NG_029780 Homo sapiens | TGGTGATGAGTTAGT |
| NO: 1883 | X-ray repair cross complementing 5 | ATGGACTACTTGAAC |
| | (XRCC5), RefSeqGene on chromosome 2 | CTCAAAACTGGGCCT |
| | | CTCACCCAAAGCCAA |
| SEQ ID | GI 1047225539 NM_001201 Homo sapiens | TGTCTTTAGTGTCCT |
| NO: 1884 | bone morphogenetic protein 3 | CACTGGTAAAATGAA |
| | (BMP3), mRNA | GAGGCTGGCCATGAG |
| | | CTGGAAGGGTTAAGT |
| SEQ ID | GI 2304970 U82828 Homo sapiens | CCACGTTCCGCAGTC |
| NO: 1885 | ataxia telangiectasia | AAACCAGCCTCTTGA |
| | (ATM) gene, complete cds | TTGCTTCCTCTCTCC |
| | | TTATCCTTCTCATTA |
| SEQ ID | GI 1015635417 AH006868 Homo sapiens | AGATATTTGGCATGA |
| NO: 1886 | CD9 antigen | TCTTCAGTATGATCT |
| | (CD9) gene, complete cds | TGTGCTGTGCTATCC |
| | | GCAGGAACCGCGAGA |
| SEQ ID | GI 34732733 AY388493 Homo sapiens | GGCAGCCAAGAGGAA |
| NO: 1887 | microsomal glutathione S-transferase 3 | TTTGGGAAGTAGTGA |
| | (MGST3) gene, complete cds | AGGAGACCTTTACCC |
| | | CAGGAGTGTTCTATT |
| SEQ ID | ref \| NG_008776.1\| Homo sapiens | AAGAGGGTGATTTGG |
| NO: 1888 | ciliary neurotrophic factor | AAAAGGCTCGCAAAT |
| | (CNTF), RefSeqGene on | CAGCACAAACTTGAA |
| | | AGCCAAGCATGGAAT |
| SEQ ID | GI 359465544 NG_031854 Homo sapiens | AACAAGAGCAGTGAA |
| NO: 1889 | glutamate ionotropic | CCTGGAAGTGACGAA |
| | receptor NMDAtype subunit 2B | CGGGGGATAGATGTT |
| | (GRIN2B), RefSeqGene on chromoso [symbol] | GCTTTTTGTCATTGG |
| SEQ ID | GI 300116187 NG_023252 Homo sapiens | CAAAACTTTGAACAG |
| NO: 1890 | interleukin 4 | CCTCACAGAGCAGAA |
| | (IL4), RefSeqGene on chromosome 5 | GGTGAGTACCTATCT |
| | | GGCACCATCTCTCCA |
| SEQ ID | GI 193211428 NG_008124 Homo sapiens | CTAGCTCACCAGATC |
| NO: 1891 | msh homeobox 2 | GAGATCCTCACTAGA |
| | (MSX2), RefSeqGene on chromosome 5 | ACCCCCAAGTGTAGA |
| | | CACTGGACTTGTGAC |
| SEQ ID | GI 224809269 NG_011475 Homo sapiens | TCATCCATGAAGGTT |
| NO: 1892 | toll like receptor 4 | TCCATAAAAGCCGAA |
| | (TLR4), RefSeqGene on chromosome 9 | AGGTGATTGTTGTGG |
| | | TGTCCCAGCACTTCA |
| SEQ ID | GI 319655745 NG_028087 Homo sapiens | GACTGCAATACCCCA |
| NO: 1893 | toll like receptor 6 | GTCTCTGCCTCTGTT |
| | (TLR6), RefSeqGene on chromosome 4 | TGCAAATGCTCTGCT |
| | | TCTCTGTATCTCTCT |
| SEQ ID | GI 599044742 NM_012234 Homo sapiens | CACACATCCAGTCCT |
| NO: 1894 | RING1 and YYl binding protein | GACATGGAGCTTTTC |
| | (RYBP), mRNA | AGTGTTTGGAGACAT |
| | | TTCTCAATCCCCTGC |
| SEQ ID | GI 270048011 GU143397 Homo sapiens | TCCTTGCCTCCTCAC |
| NO: 1895 | collagen, type III, alpha 1 | CCTTTCTTTCCCCTG |
| | (COL3A1) gene, complete cds | AACTCTCAATCCTTC |
| | | TTCCTTTCTCATTCC |
| SEQ ID | GI 24079970 AF550128 Homo sapiens | GTACTTGTCTGTGTG |
| NO: 1896 | excision repair cross-complementing | TTTGGTGTCCTGAGA |
| | rodent repair deficiency, | GAGGTCAGCCAGGAA |
| | complementation group 5 | GCGACTTGGAAATAT |
| | (ERCC [symbol] | |
| SEQ ID | GI 32165625 AY323826 Homo sapiens | CAAATATCACAGATG |
| NO: 1897 | interleukin 10 receptor, beta | TGGCAGGTCCCTGAA |
| | (IL10RB) gene, complete cds | TCTCTACAGGGTGAG |
| | | TTTCTCACCCTCTGC |
| SEQ ID | GI 300068920 NG_023233 Homo sapiens | CTAACTTACCTCTGT |
| NO: 1898 | bone morphogenetic protein 2 | GACCTGTTTCTGCAA |
| | (BMP2), RefSeqGene on chromosome 20 | CCAGGGGTGTTGCAA |
| | | TGGATGCTTTTGTCT |
| SEQ ID | GI 389565477 NG_032771 Homo sapiens | TGCATAATCCCTGTC |
| NO: 1899 | bone morphogenetic protein 7 | TTCCTATACTCTGTC |
| | (BMP7), RefSeqGene on chromosome 20 | CCGCTGGGATGCCCT |
| | | TAACAATTTATGGGG |
| SEQ ID | GI 227496937 NG_011931 Homo sapiens | GATGTCTGGCTTCTT |
| NO: 1900 | cholinergic receptor | CATCCTATGACTTAG |
| | nicotinic alpha 4 subunit | AGCTTCATCCGTGCT |
| | (CHRNA4), RefSeqGene on chromosome 20 | GTTGTGTGTGTCCGT |
| SEQ ID | GI 300193077 NG_023299 Homo sapiens | GAGGAGCTGGTTGTT |
| NO: 1901 | cAMP responsive element binding protein 1 | AAAGAGCAAACTCAG |
| | (CREB1), RefSeqGene on chromosome 2 | GTAGGGAGGAAACCT |
| | | GGGACATAAGACCAG |
| SEQ ID | GI 678246480 NG_034237 Homo sapiens | CCCCAAACCGCATCT |
| NO: 1902 | cytokine receptor like factor 2 | CTAAACAGTTCCCAC |
| | (CRLF2), RefSeqGene on chromosome X and 7 | AATCACTTCTGCTTT |
| | | GCTTGTACGAAGGAG |
| SEQ ID | GI 315013553 NG_027995 Homo sapiens | TGTCCTGGGTTTGAA |
| NO: 1903 | cystatin A | CCCTTGTTCAATTTG |
| | (CSTA), RefSeqGene on chromosome 3 | TTCTATGGGAAGCTC |
| | | CTCCTCCTCTCTGAG |
| SEQ ID | GI 747813982 NG_007933 Homo sapiens | ACTTGAGTACAGGAA |
| NO: 1904 | cytochrome P450 | CTAGCTTGCAACACA |
| | family 2 subfamily S member 1 | GACTCTAAGCCCACT |
| | (CYP2S1), RefSeqGene on chromosome 19 | CCCATTTCTTCCACC |
| SEQ ID | GI 281182565 NG_016196 Homo sapiens | TCAGGTGTTTATCTC |
| NO: 1905 | endothelin 1 | CTCTGCATTTGTGTA |
| | (EDN1), RefSeqGene on chromosome 6 | ATCTCCCTGAAGGTG |
| | | GATAAGCCAAGGGCA |
| SEQ ID | GI 429535869 NG_033019 Homo sapiens | CATGCATGCTATAGT |
| NO: 1906 | interleukin 5 | TTCATGTGACCCCCA |
| | (IL5), RefSeqGene on chromosome 5 | CCAGCTTTGATGTAT |
| | | TACACCCTGCCCATT |
| SEQ ID | GI 1154067879 NG_052976 Homo sapiens | AGGCTAGGGTAGTTC |
| NO: 1907 | malate dehydrogenase 2 | CAGAGAAGGCAGTGG |
| | (MDH2), RefSeqGene on chromosome 7 | AGGTAACAGAACAGG |
| | | CCTTGTAAAACTTTG |
| SEQ ID | GI 1154067879 NG_052976 Homo sapiens | GAATCAGAAACGGTG |
| NO: 1908 | malate dehydrogenase 2 | ACATTTCTCTTGTGG |
| | (MDH2), RefSeqGene on chromosome 7 | GGTGTTTGTTCTAGG |
| | | CTACCTCGGACCTGA |
| SEQ ID | GI 160358379 NG_007100 Homo sapiens | AAGCTTTGGGTTTGC |
| NO: 1909 | methylmalonyl-CoA mutase | CAACTGTGAAAAGTG |
| | (MUT), RefSeqGene on chromosome 6 | CTCGAATTGCCAGGA |
| | | ACACACAAATCATCA |
| SEQ ID | GI 1024357482 NG_046924 Homo sapiens | CTGCTTCTGTTCCAG |
| NO: 1910 | NLR family pyrin domain containing 5 | GCTTGTTAGCTGGTG |
| | (NLRP5), RefSeqGene on chromosome 19 | GAGAAGCAGTTTATG |
| | | GGAAAAGTTGACGTC |
| SEQ ID | GI 302058260 NG_023447 Homo sapiens | AAGTGCAGTTGTGAG |
| NO: 1911 | resistin | TAGTTAGTTACAACC |
| | (RETN), RefSeqGene on chromosome 19 | AGATACACGCAGGGT |
| | | GCTTACCCCTTCCTG |
| SEQ ID | GI 325588345 HQ995528 Homo sapiens | CAGCCAGAGGACCAG |
| NO: 1912 | testicular nuclear receptor 4 | TCTGCAAGTGAGATA |
| | (NR2C2) mRNA, complete cds | ACTCGGGCATTTGAT |
| | | ACCTTAGCTAAAGCA |
| SEQ ID | GI 164690417 AK312618 Homo sapiens | AATTAGGGACTTATT |
| NO: 1913 | cDNA, FLI93000, Homo sapiens | TCAAATTTGGACATG |
| | RAB5A, member RAS oncogene family | GCTAGTCGAGGCGCA |
| | (RAB5A), mRNA | ACAAGACCCAACGGG |
| SEQ ID | GI 984290537 NM_001319196 Homo sapiens | TAACTTCCAGGAGTT |
| NO: 1914 | S100 calcium binding protein A8 | CCTCATTCTGGTGAT |
| | (S100A8), transcript variant 1, mRNA | AAAGATGGGCGTGGC |
| | | AGCCCACAAAAAAAG |
| SEQ ID | GI 224809429 NG_011538 Homo sapiens | CGGTATGGCTAGTGT |
| NO: 1915 | potassium voltage-gated channel | AGCACTTAACATTGC |
| | interacting protein 1 | TTGGTGCTTGGTGAC |
| | (KCNIP1), RefSeqGene on chromoso [symbol] | ATTCCCAAACGTTCA |
| SEQ ID | GI 874507491 NG_042218 Homo sapiens | GGAAGAAGGGGCCAG |
| NO: 1916 | surfactant protein D | CCTACTTTCCCTATA |
| | (SFTPD), RefSeqGene on chromosome 10 | AGGGATAAAAGTGGG |
| | | TCTCCAATGACCTTC |
| SEQ ID | GI 374253764 NG_032037 Homo sapiens | CACACTGGGACTGTT |
| NO: 1917 | SMAD family member 5 | TAGACATGCATGCCA |
| | (SMAD5), RefSeqGene on chromosome 5 | GTTCATCTGATGTGC |
| | | ACATCTTTGGGATGT |
| SEQ ID | GI 150010588 NM_003641 Homo sapiens | CGCAGAAAACCACAC |
| NO: 1918 | interferon induced | TTCTCAAACCTTCAC |
| | transmembrane protein 1 | TCAACACTTCCTTCC |
| | (IFITM1), mRNA | CCAAAGCCAGAAGAT |
| SEQ ID | GI 169234615 NM_002514 Homo sapiens | TTTGGGTAAACCAGC |
| NO: 1919 | nephroblastoma overexpressed | TCTGAACTTCCAAGC |
| | (NOV), mRNA | TCCAAATCCAAGGAA |
| | | ACATGCAGCTCTTCA |
| SEQ ID | GI 226530635 NG_011844 Homo sapiens | AGAGCCTTCCAACTG |
| NO: 1920 | adenosine deaminase, RNA specific | GAATGAATCCAGTGG |
| | (ADAR), RefSeqGene on chromosome 1 | GTTGTGTTTGTCCAT |
| | | CAAACTTTGACTCCC |
| SEQ ID | GI 363807289 NG_031933 Homo sapiens | TGAAGATTGGAGGAT |
| NO: 1921 | BMP binding endothelial regulator | GCTGAACCACAAACA |
| | (BMPER), RefSeqGene on chromosome 7 | CACAAGGAGAAGAGT |
| | | ACTTCCTCTGCACCA |
| SEQ ID | GI 345525419 NG_029928 Homo sapiens | ACTCCTTTTGGTTTA |
| NO: 1922 | CD86 molecule | TTCTTACCACCTTGC |
| | (CD86), RefSeqGene on chromosome 3 | TTCTGTGTTCCTTGG |
| | | GAATGCTGCTGTGCT |
| SEQ ID | GI 161086962 NG_007114 Homo sapiens | GAGCAAAGCCCTCTA |
| NO: 1923 | insulin | GCCTCATCCTCATAA |
| | (INS), RefSeqGene on chromosome 11 | AAGGTCTCATCATTT |
| | | TCCCTCCAGCCTCTT |
| SEQ ID | GI 237858724 NG_012101 Homo sapiens | CCAGCAACTACTCAC |
| NO: 1924 | matrix metallopeptidase 8 | TCCCTCAAGATGACA |
| | (MMP8), RefSeqGene on chromosome 11 | TCGATGGCATTCAGG |
| | | CCATCTATGGTAAGG |
| SEQ ID | GI 167614492 NM_016583 Homo sapiens | CTGGCTGTGAAGCTG |
| NO: 1925 | BPI fold containing family A member 1 | GACATCACTGCAGAA |
| | (BPIFA1), transcript variant 1, mRNA | ATCTTAGCTGTGAGA |
| | | GATAAGCAGGAGAGG |
| SEQ ID | GI 23110953 NM_001911 Homo sapiens | CGGACCATCCAGAAT |
| NO: 1926 | cathepsin G | GACATCATGTTATTG |
| | (CTSG), mRNA | CAGCTGAGCAGAAGA |
| | | GTCAGACGGAATCGA |
| SEQ ID | GI 50659096 NM_005218 Homo sapiens | GTGGTAACTTTCTCA |
| NO: 1927 | defensin beta 1 | CAGGCCTTGGCCACA |
| | (DEFB1), mRNA | GATCTGATCATTACA |
| | | ATTGCGTCAGCAGTG |
| SEQ ID | GI 118722343 NM_030949 Homo sapiens | CATGAGGAAACTGAG |
| NO: 1928 | protein phosphatase 1 | CCCTCCGCAGAAGAA |
| | regulatory inhibitor subunit 14C | GAGTGTATGATTCTG |
| | (PPP1R14C), mRNA | GAACAGGGTGAAACT |
| SEQ ID | GI 339639570 NG_029386 Homo sapiens | TATTTTCTTCTTCAG |
| NO: 1929 | complement component 4 | TGGGCCACTGTCCTG |
| | binding protein beta | ATCCTGTGCTGGTGA |
| | (C4BPB), RefSeqGene on chromosome 1 | ATGGAGAGTTCAGTT |
| SEQ ID | GI 291219938 NG_016779 Homo sapiens | AGCAAGGAACCCAGA |
| NO: 1930 | interleukin 2 | TTACCTCAAGGTGGC |
| | (IL2), RefSeqGene on chromosome 4 | ACTCTGGGTACTTTT |
| | | TCCTTCTGAGTGATT |
| SEQ ID | GI 584593316 NG_033952 Homo sapiens | GAACTACAACGTGAG |
| NO: 1931 | mitogen-activated protein kinase kinase 4 | CCTTTATTTTGCCTC |
| | (MAP2K4), RefSeqGene on chromosome 17 | GTCTGCAACTCCATC |
| | | CTTAGCCTTTGCGTT |
| SEQ ID | GI 297139734 NG_021330 Homo sapiens | GAGCGATGAGTTCTA |
| NO: 1932 | serum amyloid A1 | TGACTGGTAAAGAAA |
| | (SAA1), RefSeqGene on chromosome 11 | AGGGCCTGCTGGTTT |
| | | CCCTCAGGATCTCTG |
| SEQ ID | GI 298160932 NG_021435 Homo sapiens | CAGAGCACCATGTAC |
| NO: 1933 | vesicle associated membrane protein 7 | TGCCTTTAACTTTCC |
| | (VAMP7), RefSeqGene | TGTCATCCTGTTTGC |
| | on chromosome X and Y | CATGCTGCACTGTAA |
| SEQ ID | GI 16118554 AF398885 Homo sapiens | CCGCAGTAGTATAGA |
| NO: 1934 | ELMOl mRNA, complete cds | GCTGACCAAGATGCT |
| | | ATGTGAGATCTTGAA |
| | | AGTGGGCGAGTTGCC |
| SEQ ID | GI 392996937 NM_001008387 Homo sapiens | CTAGGGGACTACAGA |
| NO: 1935 | regenerating family member 3 gamma | AGGAAAAAGACAAGA |
| | (REG3G), transcript variant 1, mRNA | GGCAGTAGGATATCT |
| | | GTGTGTCCTCCCGCT |
| SEQ ID | GI 669033292 NM_006798 Homo sapiens | CATGGTGTCTCAGGA |
| NO: 1936 | UDP glucuronosyltransferase | GATCTGTGATGGCGT |
| | family 2 member A1 complex locus | TCTTAAAAACCAACA |
| | (UGT2A1), transcript varia [symbol] | GCTGATGGCAAAGCT |
| SEQ ID | GI 193794854 NG_008178 Homo sapiens | AGATGACACACAACT |
| NO: 1937 | glycerol kinase | CCTGCCCAAGTGATT |
| | (GK), RefSeqGene on chromosome X | TGTCTTCCGTTTGCA |
| | | CTACCTGGTCTAAGA |
| SEQ ID | GI 171460912 NG_007496 Homo sapiens | CAAAGAATTGAACCC |
| NO: 1938 | jagged 1 | CGATCCGGTTCACAG |
| | (JAG1), RefSeqGene on chromosome 20 | AAAAATAAACTGCTC |
| | | ACCCGTCTCCACCTG |
| SEQ ID | GI 169790843 NM_000239 Homo sapiens | CTTTGAAAGGTGTGA |
| NO: 1939 | lysozyme | GTTGGCCAGAACTCT |
| | (LYZ), mRNA | GAAAAGATTGGGAAT |
| | | GGATGGCTACAGGGG |
| SEQ ID | GI 740086238 NM_017921 Homo sapiens | CACCAGTCAGTTCTC |
| NO: 1940 | NPL4 homolog, ubiquitin | CCTTGAAGTAAACCT |
| | recognition factor | CAGTGCCTGAGACTT |
| | (NPLOC4), transcript variant 1, mRNA | TTCTACCAAGCCACA |
| SEQ ID | GI 1024336732 NM_006218 Homo sapiens | GCGAAATTCTCACAC |
| NO: 1941 | phosphatidylinositol-4,5-bisphosphate | TATTATGCAAATTCA |
| | 3-kinase catalytic subunit alpha | GTGCAAAGGCGGCTT |
| | (PIK3CA), mRNA | GAAAGGTGCACTGCA |
| SEQ ID | GI 365192584 NG_031951 Homo sapiens | CACACAAATACCCCA |
| NO: 1942 | prostate transmembrane | CAGCGTGAATATGCA |
| | protein, androgen induced 1 | CATGTACGTCCTGCA |
| | (PMEPA1), RefSeqGene on chromoso [symbol] | TATACATGCAACGCA |
| SEQ ID | GI 338968872 NG_029246 Homo sapiens | GTCTCCACTGGCCAA |
| NO: 1943 | RAR related orphan receptor A | GGTTGTGGTCCTCCT |
| | (RORA), RefSeqGene on chromosome 15 | TTCCAGTATTTTTCT |
| | | TGGATGACTACAGGA |
| SEQ ID | GI 190194362 NM_006426 Homo sapiens | CACCTAAGCTTCCAT |
| NO: 1944 | dihydropyrimidinase like 4 | GTAGCCCTCATCCAG |
| | (DPYSL4), mRNA | GGAAGTTTTGCGATC |
| | | CTTTAGGAAGACACT |
| SEQ ID | GI 58530885 NM_001570 Homo sapiens | ACACACAACAAAACA |
| NO: 1945 | interleukin 1 receptor | TCTGCTGTCCTGGGT |
| | associated kinase 2 | GGGAGGGAAACTTCA |
| | (IRAK2), mRNA | TTTCACTGGAATGAG |
| SEQ ID | GI 32891806 AY340485 Homo sapiens | AGACCCAGAGAGTGA |
| NO: 1946 | biliverdin reductase B | CTTGCCCAATATCAC |
| | (flavin reductase | ACAGCTGTTAACTGA |
| | (NADPH)) | CAGGACTGGGATTTG |
| | (BLVRB) gene, complete cds | |
| SEQ ID | GI 40288424 AY506357 Homo sapiens | CCACCTTGAGCCATC |
| NO: 1947 | truncated epidermal growth factor | ATGGGGGGAGTTGGA |
| | (beta-urogastrone) | CAGCATTTACTTGTC |
| | (EGF) gene, complete cds | AGTGAATTTGGTAAG |
| SEQ ID | GI 351542176 NG_030342 Homo sapiens | GAAGTGGGCCCATAA |
| NO: 1948 | collectin subfamily member 12 | AAGGCCCTCACATTT |
| | (COLEC12), RefSeqGene on chromosome 18 | TAGGAGTAAAACTGT |
| | | GGGCTAAGCACCTTT |
| SEQ ID | GI 197100280 NG_008374 Homo sapiens | GTGTGTTTCTCTGTA |
| NO: 1949 | cytochrome P450 family | CCTGCATTTGCACAT |
| | 11 subfamily B member 2 | GTGTAGTGTGTGCAC |
| | (CYP11B2), RefSeqGene on | GTGTCTGTGTGTGAA |
| | chromosome [symbol] | |
| SEQ ID | GI 223972657 NG_009817 Homo sapiens | CCTTCCTTGTTCCCT |
| NO: 1950 | E1A binding protein p300 | AGCCCCAATCTGGGA |
| | (EP300), RefSeqGene on chromosome 22 | TACATTCAATCAATC |
| | | TACAGGGTCTGCACA |
| SEQ ID | GI 293597500 NG_016966 Homo sapiens | CAGTGGCTAGCTAAG |
| NO: 1951 | phosphoglucomutase 1 | GATGGATATTTCAGG |
| | (PGM1), RefSeqGene on chromosome 1 | ATGGATCTGTGGAAT |
| | | GGTTACTGGGCCCAG |
| SEQ ID | GI 49066030 AY654286 Homo sapiens | TAGAATGGGACAAGA |
| NO: 1952 | interferon | TTAGGGTCAACCTCA |
| | (alpha, beta and omega) receptor 1 | GGCTGTCCTGTAGGC |
| | (IFNAR1) gene, complete cds | TTTTGGGGATTTTGT |
| SEQ ID | GI 440503012 JX512452 Homo sapiens | CTGAGGTAAGGGCCC |
| NO: 1953 | mitogen-activated protein kinase 14 | TGTGCTCCAGGAAAT |
| | (MAPK14) gene, complete cds | AGCTAAGAGACCAGT |
| | | ACAGCTAGAGCTAAA |
| SEQ ID | GI 212549766 NG_008985 Homo sapiens | ATTTTTCCTGACTGG |
| NO: 1954 | N-acylsphingosine amidohydrolase 1 | TTCCCAGAGTACAAA |
| | (ASAH1), RefSeqGene on chromosome 8 | GCACAGGACAACTTC |
| | | GCTAACTCACCCTGA |
| SEQ ID | GI 300193072 NG_023297 Homo sapiens | GTGTGTGACATTCCA |
| NO: 1955 | cyclin dependent kinase inhibitor 2B | GGGGTCGTTTGCTTT |
| | (CDKN2B), RefSeqGene on chromosome 9 | TCAGGGTTTTCTGAG |
| | | GGAAAGTGCATATGA |
| SEQ ID | GI 315360647 NG_028023 Homo sapiens | GACCTCTACAGCACC |
| NO: 1956 | conserved helix-loop-helix ubiquitous kinase | AGCATTTCCTGGAAG |
| | (CHUK), RefSeqGene on chromosome 10 | CTCTGCCCATAATTA |
| | | GTTTTGCAGAAGTGC |
| SEQ ID | GI 747813982 NG_007933 Homo sapiens | TTGAATCAGGGCTGG |
| NO: 1957 | cytochrome P450 family 2 | TGTCAGTTGGATCAG |
| | subfamily S member 1 | GGTGGTAGGGAAAGG |
| | (CYP2S1), RefSeqGene on chromosome 19 | AGGAAATGGATAAAT |
| SEQ ID | GI 284055256 NG_016403 Homo sapiens | TCTGACCTAAGAGCC |
| NO: 1958 | dystrophin related protein 2 | TGGAGCTGAAGGGCT |
| | (DRP2), RefSeqGene on chromosome X | CATCTCATCTCTGTA |
| | | TTTACTTCCTGGCTC |
| SEQ ID | GI 410991940 NG_032977 Homo sapiens | ATTGTTCAAGGAACA |
| NO: 1959 | interleukin 12 receptor subunit beta 2 | GTCTGAAGGCCAGTG |
| | (IL12RB2), RefSeqGene on chromosome 1 | TGAATGGAGCAGAGT |
| | | GAACCAGGCAAAAAT |
| SEQ ID | GI 212549709 NG_008958 Homo sapiens | TAGCAGAAGGTCAGC |
| NO: 1960 | minichromosome maintenance complex component 6 | TTTCACAGTTATTTC |
| | (MCM6), RefSeqGene on chromosom [symbol] | CCACTGAGAAGAGGC |
| | | GCTTTGATACTGCCA |
| SEQ ID | GI 312433967 NG_027936 Homo sapiens | CCGTACAATGTGGGC |
| NO: 1961 | pannexin 1 | ACCACCCATCTACAC |
| | (PANX1), RefSeqGene on chromosome 11 | CATTTCTCAAATTCT |
| | | CTGTGCATGCAGATC |
| SEQ ID | GI 237858748 NG_012115 Homo sapiens | GTCAGGAGGTCTTGA |
| NO: 1962 | phospholipid transfer protein | GAATTAGACTGGAGA |
| | (PLTP), RefSeqGene on chromosome 20 | GGGAATTTGGGCCTG |
| | | GTTCTTGGAAAACCT |
| SEQ ID | GI 747165391 NM_004590 Homo sapiens | TACTTAGCCAGTTTC |
| NO: 1963 | C-C motif chemokine ligand 16 | CAGCCTTCCAGATGA |
| | (CCL16), mRNA | TCTTTGCCCTCTGGG |
| | | TCTTGACCCATTAAG |
| SEQ ID | GI 974005372 NM_005944 Homo sapiens | ATTTGACACAAGAGA |
| NO: 1964 | CD200 molecule | AAAGCAGGAGGAAAA |
| | (CD200), transcript variant 1, mRNA | GGGGCCATTCTCCAA |
| | | AGGACCTGAAAGAGC |
| SEQ ID | GI 23110953 NM_001911 Homo sapiens | AGTCTTCACCAGGGT |
| NO: 1965 | cathepsin G | CTCAAGTTTCCTGCC |
| | (CTSG), mRNA | CTGGATAAGGACAAC |
| | | AATGAGAAGCTTCAA |
| SEQ ID | GI 440503012 JX512452 Homo sapiens | TGTTCCCTGCTCCCC |
| NO: 1966 | mitogen-activated protein kinase 14 | TTCCTCTTCTTGTGT |
| | (MAPK14) gene, complete cds | CTGTATCTCCAGCTA |
| | | CCATTTAGTCAGTCA |
| SEQ ID | GI 60391402 AB019488 Homo sapiens | GTATGCATTTGTGTG |
| NO: 1967 | NTRK1 gene for TRKA, complete cds | TGCACGCCTGTGTAA |
| | | GTGTGTATGCAGGTC |
| | | TGAACAGGTGCATAT |
| SEQ ID | GI 350606318 NG_009014 Homo sapiens | GTCAAAAAGACCGGC |
| NO: 1968 | androgen receptor | CCAATAGCTTCTCAG |
| | (AR), RefSeqGene on chromosome X | CGGGTATCCTCCAGA |
| | | GAGGTAAAGTGAAAT |
| SEQ ID | GI 329665040 NG_028340 Homo sapiens | CATACCTGCTAAAGA |
| NO: 1969 | granzyme B | AACTATCCTGATGGA |
| | (GZMB), RefSeqGene on chromosome 14 | TTTAGCAGCATGGCC |
| | | ATGAGGCATTGGCGG |
| SEQ ID | GI 257153317 NG_012804 Homo sapiens | TGAGAGGGCAAGGTC |
| NO: 1970 | mannosidase beta | TCTGGGAGGTAGGAG |
| | (MANBA), RefSeqGene on chromosome 4 | ATAAGAAGAGGATGG |
| | | ATTCACTTTGGGATG |
| SEQ ID | GI 237858770 NG_012124 Homo sapiens | CCTATACTGACCTGA |
| NO: 1971 | selectin E | GACAGAGGCAGCAGT |
| | (SELE), RefSeqGene on chromosome 1 | GATACCCACCTGAGA |
| | | GATCCTGTGTTTGAA |
| SEQ ID | GI 237858802 NG_012136 Homo sapiens | GACCACCATAAACTC |
| NO: 1972 | thrombopoietin | TGCTAGGGGATCTCT |
| | (THPO), RefSeqGene on chromosome 3 | AAAAAGGAGTCAGGC |
| | | TTATGGGGCTTTGCA |
| SEQ ID | GI 1036029829 AH003667 Homo sapiens | GAGGGTACTGAGGTA |
| NO: 1973 | chromosome 1 leptin receptor | ACCTATGAGGCCGAA |
| | (LEPR) gene, complete cds | AGCCAGAGACAACCC |
| | | TTTGTTAAATACGCC |
| SEQ ID | GI 520975386 NM_001278651 Homo sapiens | TGTCTCGAACCCTGG |
| NO: 1974 | Ran GTPase activating protein 1 | TCTAAAGTGATCTTC |
| | (RANGAP1), transcript variant 1, mRNA | CCGCCTAGCCTCCCA |
| | | AAATGTTGGAATTAC |
| SEQ ID | GI 313661479 NM_145725 Homo sapiens | AGCCCCCTTGCTTTT |
| NO: 1975 | TNF receptor associated factor 3 | GTATCTGTGAGGTGA |
| | (TRAF3), transcript variant 1, mRNA | ATGAGGGTCTGTCAC |
| | | CCAAATCTACTTCTC |
| SEQ ID | GI 117606567 EF064758 Homo sapiens | ATCGGAGACAACACC |
| NO: 1976 | chemokine | ACAGTGGACTACACT |
| | (C-C motif) receptor 7 | TTGTTCGAGTCTTTG |
| | (CCR7) gene, complete cds | TGCTCCAAGAAGGAC |
| SEQ ID | GI 117606505 EF064727 Homo sapiens | TTGAGGTTCGAATGA |
| NO: 1977 | inducible T-cell co-stimulator | TGTGCGATGTGTAAT |
| | (ICOS) gene, complete cds | GAGACAGAAGCCACT |
| | | GCATTTTTCCACCCC |
| SEQ ID | GI 38045925 AY449709 Homo sapiens | GGGCTGCATTTTATT |
| NO: 1978 | interleukin 7 receptor | GGGCCGGCAAGTAAC |
| | (IL7R) gene, complete cds | TTTAAATCCCAGCTC |
| | | ACACTCTACTGAGTG |
| SEQ ID | GI 254039585 NG_012387 Homo sapiens | CCCAGTTGAAGATGG |
| NO: 1979 | aldolase, fructose-bisphosphate B | GGAAACCAGGAAATG |
| | (ALDOB), RefSeqGene on chromosome 9 | TGCCATCAGATACTA |
| | | AGTGGAGTCAAGGGA |
| SEQ ID | GI 334085206 NG_029005 Homo sapiens | TGGCTGAACTGCTCT |
| NO: 1980 | CASP8 and FADD like apoptosis regulator | ACAGAGTGAGGCGAT |
| | (CFLAR), RefSeqGene on chromosome 2 | TTGACCTGCTCAAAC |
| | | GTATCTTGAAGATGG |
| SEQ ID | GI 1024846796 NG_046983 Homo sapiens | GAGGGCTTAATACCA |
| NO: 1981 | cAMP responsive element binding protein 3 | AGAGAACAAGTGAAG |
| | (CREB3), RefSeqGene on chromosome 9 | TGGGAGAAGCAGGGC |
| | | TAAACTTTCAGGGGA |
| SEQ ID | GI 577019604 NG_033916 Homo sapiens | AAATCACGTGGACCC |
| NO: 1982 | growth differentiation factor 2 | CTCTCATGACCTGAA |
| | (GDF2), RefSeqGene on chromosome 10 | AGGAAGCGTGGTCAT |
| | | TTATGATGTTCTGGA |
| SEQ ID | GI 342672038 NG_029624 Homo sapiens | CAAGACCAAATGGGA |
| NO: 1983 | NFKB inhibitor beta | TACCTGTCTCTTCCA |
| | (NFKBIB), RefSeqGene on chromosome 19 | GTCCCAGGACAAATG |
| | | TGGTTCAGAAGGGAT |
| SEQ ID | GI 105990527 NM_012258 Homo sapiens | ATCTGCCAGGACTGG |
| NO: 1984 | hes related family Bhlh | CAGTTCTGATTTAGT |
| | transcription factor with YRPW motif 1 | TAGGAGAGAGCCGCT |
| | (HEY1), transcript variant 1, | GATAGGTTAGGTCTC |
| SEQ ID | GI 1028916196 KU928257 Homo sapiens | GTACCTAATGCCCAG |
| NO: 1985 | complement decay-accelerating factor | CCAGCTTTGGAAGGC |
| | (CD55) gene, CD55-203A allele, | CGTACAAGTTTTCCC |
| | complete cds | GAGGATACTGTAATA |
| SEQ ID | GI 4588599 AF111163 Homo sapiens | TTACCCTTAGTCTCA |
| NO: 1986 | pyrin | GTTCCCACCAAGACA |
| | (MEFV) gene, complete cds | CAGAGCATTTCCTGT |
| | | GCCTTTTCCGCTATT |
| SEQ ID | GI 1048072306 NG_051267 Homo sapiens | TGTTTTAAGCAGGGC |
| NO: 1987 | arsA arsenite transporter, | AATGTCGTGGCCAAA |
| | ATP-binding, homolog 1 | TTCATGTTTGAAAAG |
| | (bacterial) | TACCCTTTGACGGCC |
| | (ASNAl), RefSeqGene on chr [symbol] | |
| SEQ ID | GI 334278891 NG_029019 Homo sapiens | TGTGAGTGGATACAT |
| NO: 1988 | CCAAT/enhancer binding protein beta | GTACAGCGTCCCACA |
| | (CEBPB), RefSeqGene on chromosome 20 | GTGCCTGGCACGCAA |
| | | GAAGTGTTATATAAG |
| SEQ ID | GI 291219938 NG_016779 Homo sapiens | AGCAGTCTACTAGTG |
| NO: 1989 | interleukin 2 | ACTTTACTGCCACAA |
| | (IL2), RefSeqGene on chromosome 4 | CCAGAAAAGCCAGCT |
| | | GATGTGTCAGACGTG |
| SEQ ID | GI 224809272 NG_011478 Homo sapiens | TGATGCCCAGAGAAG |
| NO: 1990 | uncoupling protein 2 | GGATACCATTTGCCT |
| | (UCP2), RefSeqGene on chromosome 11 | GAGCCTTCTCAGTAC |
| | | TGTTTAATCAGCCTG |
| SEQ ID | GI 112293258 NM_001736 Homo sapiens | AATTGTAAGTAATGA |
| NO: 1991 | complement C5a receptor 1 | TACAGAGGGATCTTG |
| | (C5AR1), mRNA | TGTACCCTTCACCCA |
| | | GCCTCCCCCAATGGC |
| SEQ ID | GI 1041817991 NM_000569 Homo sapiens | TTACTTCCTCCTGTC |
| NO: 1992 | Fc fragment of IgG receptor Illa | TAGTCGGTTTGGTCC |
| | (FCGR3A), transcript variant 1, mRNA | CTTTAGGGCTCCGGA |
| | | TATCTTTGGTGACTT |
| SEQ ID | GI 571330780 NM_001136022 Homo sapiens | ACTGGAGACGCGGCC |
| NO: 1993 | nuclear factor of activated T-cells 4 | TCTAAGAGAGGTTGA |
| | (NFATC4), transcript variant 1, mRNA | AACTGTGTGTGTGTG |
| | | GGAGAAAATGATAAC |
| SEQ ID | GI 21634442 AF274025 Homo sapiens | CTGAGGAAGATTATA |
| NO: 1994 | GTP-binding protein Rab25 | ACTTTGTCTTCAAGG |
| | mRNA, complete cds | TGGTGCTGATCGGCG |
| | | AATCAGGTGTGGGGA |
| SEQ ID | GI 256017191 NM_002977 Homo sapiens | AGGCCTGTTTCACAG |
| NO: 1995 | sodium voltage-gated channel | ATGGTTGTGTACGGA |
| | alpha subunit 9 | GGTTCTCATGCTGCC |
| | (SCN9A), mRNA | AAGTTAACATAGAGT |
| SEQ ID | GI 384551644 NM_005428 Homo sapiens | TTACCAGCAGAACTC |
| NO: 1996 | vav guanine nucleotide exchange factor 1 | TCTAAAGGATTGCTT |
| | (VAV1), transcript variant 1, mRNA | CAAGTCTCTGGACAC |
| | | CACCTTGCAGTTCCC |
| SEQ ID | GI 117606495 EF064722 Homo sapiens | CCACAACAGCATTCA |
| NO: 1997 | interleukin 6 signal transducer | GGACTGTAGAGGAGA |
| | (gpl30, oncostatin M receptor) | CCACCACTGCCTGTT |
| | (II6ST) gene, complete cds | TTCTGGAGAGTTTAG |
| SEQ ID | GI 83026500 DQ309025 Homo sapiens | TTTTTCTCCTATTAA |
| NO: 1998 | transforming growth factor | AGGGCCTTGAGGGAT |
| | beta 1 induced transcript 1 | GGAGCTCTATTCAGA |
| | (TGFBIIl) gene, complete cds | GTGCCAGCTGTGCTC |
| SEQ ID | GI 269914110 NG_015981 Homo sapiens | CACATTGGTTTCCTC |
| NO: 1999 | anti-Mullerian hormone receptor type 2 | CTGAGAAGAGTCAAC |
| | (AMHR2), RefSeqGene on chromosome 12 | AGAGTCCAGCATCTT |
| | | CTTCCAAGGTCAGGG |
| SEQ ID | GI 347658933 NG_030027 Homo sapiens | TTCTTTCTTCTCTTC |
| NO: 2000 | AT-rich interaction domain 5B | ATTTAGGGTCACACA |
| | (ARID5B), RefSeqGene on chromosome 10 | CACTCCGGGACCATG |
| | | GAGGGAGGTATCAGA |
| SEQ ID | GI 349732110 NG_030313 Homo sapiens | TCGAAGGAGGCACTC |
| NO: 2001 | dihydrolipoamide S-succinyltransferase | CACTTTTCACACTCA |
| | (DLST), RefSeqGene on chromosome 14 | GGAAAACTGGTGGTA |
| | | AAGAAGTTCTCCTGG |
| SEQ ID | GI 344217739 NG_029805 Homo sapiens | CATTCCCGAGCTCAT |
| NO: 2002 | DnaJ heat shock protein family | GTACCGCACTCAAGA |
| | (Hsp40) member C5 | TCAAGGATACACTGG |
| | (DNAJC5), RefSeqGene on chromosome [symbol] | ACATTGAAGGGTGAG |
| SEQ ID | GI 767172199 NG_042051 Homo sapiens | GGTGACTTAGATGTG |
| NO: 2003 | kelch like family member 41 | TGTTAAAGTTGAAGG |
| | (KLHL41), RefSeqGene on chromosome 2 | CCGCCGATCTAGAGA |
| | | AACGTGGCTGCCTAT |
| SEQ ID | GI 342187223 NG_029593 Homo sapiens | TTCCTCTTGTTTGTG |
| NO: 2004 | LYN proto-oncogene, | TGATCCTTGTGACAT |
| | Src family tyrosine kinase | CTGACTTGGGTGACA |
| | (LYN), RefSeqGene on chromosome 8 | TGCTTCCTCTGTGGA |
| SEQ ID | GI 237858739 NG_012110 Homo sapiens | ATGGAATCCCATAGA |
| NO: 2005 | programmed cell death 1 | AACACCCCAAATCTA |
| | (PDCD1), RefSeqGene on chromosome 2 | ACTTGATCCAGGACC |
| | | AGCCAGTGGTCACTT |
| SEQ ID | GI 1018443413 NG_027814 Homo sapiens | GTAGAGATTTTTTGA |
| NO: 2006 | SATB homeobox 1 | GTTTCAGTCTCCACT |
| | (SATB1), RefSeqGene on chromosome 3 | TGGGAAGGTTCCTTG |
| | | GCCCCTTCTCTCCCA |
| SEQ ID | GI 22035651 NM_014349 Homo sapiens | CAGGCATCTTCCTTG |
| NO: 2007 | apolipoprotein L3 | CACTGGATGTGGTCA |
| | (APOL3), transcript | ACCTTGTATACGAGT |
| | variant alpha/a, mRNA | CAAAGCACTTGCATG |
| SEQ ID | GI 2909349 Y12863 Homo sapiens | GCGAGTGTGTCTGTA |
| NO: 2008 | mRNA for growth factor FIGF | AAACACCATGTCCCA |
| | | AAGATCTAATCCAGC |
| | | ACCCCAAAAACTGCA |
| SEQ ID | GI 378404896 NM_001256796 Homo sapiens | GAGGAGGGAGAAATG |
| NO: 2009 | purinergic receptor P2X 4 | GCCACCACATCACCC |
| | (P2RX4), transcript variant 1, mRNA | CAGAGAAATTTCTGG |
| | | AATCTGATTGAGTCT |
| SEQ ID | GI 998614224 NM_001320340 Homo sapiens | GGGAGCTCTTTAGTC |
| NO: 2010 | small VCP interacting protein | GTCTAGGAGATGAAG |
| | (SVIP), transcript variant 1, mRNA | AGAAAAGAGCAAAGC |
| | | TTGCAGAGGCTGCAG |
| SEQ ID | GI 115432768 DQ995342 Homo sapiens | AATGATCATAGTGTC |
| NO: 2011 | ADAM metallopeptidase domain 33 | CGCTTCAGGGTGGTT |
| | (ADAM33) gene, complete cds | TATGAGGCTTAAAGG |
| | | GAAGAAGCTCAGGCA |
| SEQ ID | GI 87046146 DQ142911 Homo sapiens | CACATCTCATATGCA |
| NO: 2012 | cogulation factor VII | CAAGACACCTCACAC |
| | (F7) gene, complete cds | TCAGGACACCTCATG |
| | | CTCAAAGAAGCCTCA |
| SEQ ID | GI 114731580 DQ993361 Homo sapiens | GTGAGTGTGATTCTA |
| NO: 2013 | glutathione S-transferase A3 | GAAGAGGATGCATTC |
| | (GSTA3) gene, complete cds | CATGGATCCAGCACC |
| | | CTGACAGAGGTTTCC |
| SEQ ID | GI 345525419 NG_029928 Homo sapiens | TTGCCACCACTATAA |
| NO: 2014 | CD86 molecule | CCTCATCATGGCTCA |
| | (CD86), RefSeqGene on chromosome 3 | CCTTCCTGCTGCTTC |
| | | TCAACTACTGTTCTG |
| SEQ ID | GI 270289740 NG_015895 Homo sapiens | CTCTGGGTGGCTGAT |
| NO: 2015 | four and a half LIM domains 1 | TAGCTGAGGGTAACC |
| | (FHL1), RefSeqGene on chromosome X | TTCATATAGCTGGCA |
| | | TGGGATTTCCAGATG |
| SEQ ID | GI 226693358 NG_011855 Homo sapiens | GGAGTCTCATGCACC |
| NO: 2016 | heat shock protein family A | ACCTATCACACTCCC |
| | (Hsp70) member 1 like | TCACATCCTGTTTCT |
| | (HSPAlL), RefSeqGene on chromosome [symbol] | GACTTTGGAATGGAC |
| SEQ ID | GI 224809277 NG_011481 Homo sapiens | ACAATGGAGTGGGAT |
| NO: 2017 | interleukin 18 receptor accessory protein | TGAGACTGTGGTTTA |
| | (IL18RAP), RefSeqGene on chromosome 2 | GAGCCTTTGATTTCC |
| | | TGGACTGGACTGACG |
| SEQ ID | GI 237858713 NG_012098 Homo sapiens | AAAACTGGCAGCAGC |
| NO: 2018 | KIT ligand | AAGTACAAAGGGCTT |
| | (KITLG), RefSeqGene on chromosome 12 | GAGGCAGGAATTACC |
| | | TTCCAGGTATTTCAG |
| SEQ ID | GI 226493744 NG_011821 Homo sapiens | AAATCACTGCCACCA |
| NO: 2019 | nuclear receptor subfamily 4 group A member 2 | CTTCTCTCCCCAGCT |
| | (NR4A2), RefSeqGene on chromosome 2 | TCAGTACCTTTATGG |
| | | ACAACTACAGCACAG |
| SEQ ID | GI 1027250682 NG_047124 Homo sapiens | AGGACCTCTATTCTG |
| NO: 2020 | solute carrier family 27 member 5 | TAGGGGCTAAGGTGG |
| | (SLC27A5), RefSeqGene on chromosome 19 | GCTGCATATATAACC |
| | | AGCACTTGGTTCTCT |
| SEQ ID | GI 425905339 NM_080725 Homo sapiens | CCAGTTCCCACCTCT |
| NO: 2021 | sulfiredoxin 1 | GTGACAATAGGATCA |
| | (SRXN1), mRNA | TGGCCTTACCCTTGA |
| | | AGCATTACCGAGAAG |
| SEQ ID | GI 117606531 EF064740 Homo sapiens | CGGGTGCATTGAATA |
| NO: 2022 | Epstein-Barr virus induced gene 3 | AGAGCAGTCCAGCAA |
| | (EBI3) gene, complete cds | TCTGATTCCTAGGCC |
| | | TCTACCGAAAAGGAT |
| SEQ ID | GI 39654020 AY496422 Homo sapiens | AGAGAGTGAGGATGA |
| NO: 2023 | nuclear factor of kappa light polypeptide | GGAGAGCTATGACAC |
| | gene enhancer in B-cells inhibitor, alpha | AGAGTCAGAGTTCAC |
| | (NFKBIA) gen | GGAGTTCACAGAGGA |
| SEQ ID | GI 7417326 AF237581 Homo sapiens | GTGCTCACAGTTACA |
| NO: 2024 | migration inhibitory factor- | CAGGACGACAGGGTC |
| | related protein 14 variant P | AAGAATTTGCTCAAT |
| | (S100A9) gene, complete cds | TGAACACCTGCCATT |
| SEQ ID | GI 662236863 NG_034192 Homo sapiens | GAATGAAGGTGTTTC |
| NO: 2025 | diacylglycerol O-acyltransferase 1 | TAGAGTCAGAGTCCT |
| | (DGAT1), RefSeqGene on chromosome 8 | CAGTGAACCCTGGCA |
| | | TCCTGAGATCCAGGA |
| SEQ ID | GI 1024846743 NG_047006 Homo sapiens | GGAGCTCACTGCCCC |
| NO: 2026 | hexokinase 3 | TGAAGGCAACAGTTG |
| | (HK3), RefSeqGene on chromosome 5 | CATTCTTAGACACCT |
| | | GTGATCAATGAAAAG |
| SEQ ID | GI 654825051 NG_029042 Homo sapiens | CTTTTGGAAAGAGAG |
| NO: 2027 | prolactin receptor | GGCCTAAACAGGATC |
| | (PRLR), RefSeqGene on chromosome 5 | AGCATTGATGCCAAG |
| | | CAACACAAGGGAGAA |
| SEQ ID | GI 237858601 NG_012145 Homo sapiens | CAGTAATTCCATGAG |
| NO: 2028 | TNF receptor superfamily member 10b | CACAGGCCCATTATA |
| | (TNFRSF10B), RefSeqGene on chromosome 8 | GTGGGCGCTTCATTT |
| | | GCCATCAAGTGAGTC |
| SEQ ID | GI 260763875 NM_182569 Homo sapiens | CAGGTTTGAACCACT |
| NO: 2029 | glycerophosphodiester phosphodiesterase | GCACCCGGCCAGTAA |
| | domain containing 1 | AAGAAATTTTGAAGG |
| | (GDPD1), transcript variant [symbol] | CCATTGCAGCTATTT |
| SEQ ID | GI 209413750 NM_006038 Homo sapiens | GATGGTCTCCTTTGA |
| NO: 2030 | spermatogenesis associated 2 | GCTCTTTCTGGCCAA |
| | (SPATA2), transcript variant 1, mRNA | AGTCGAGTGTGAGCA |
| | | GATGCTAGAAATCCA |
| SEQ ID | GI 117606569 EF064759 Homo sapiens | TTCTCCAGAGGGAAT |
| NO: 2031 | chemokine | TGCAGAGTACTGGCT |
| | (C-C motif) receptor 4 | GATGGAGTAAATCGC |
| | (CCR4) gene, complete cds | TACCTTTTGCTGTGG |
| SEQ ID | GI 74418831 DQ185447 Homo sapiens | GCCCAAGGTTCAGAG |
| NO: 2032 | interferon, alpha 1 | TCACCCATCTCAGCA |
| | (IFNA1) gene, complete cds | AGCCCAGAAGTATCT |
| | | GCAATATCTACGATG |
| SEQ ID | GI 46488017 AY601851 Homo sapiens | TAAACAGTGATTGTG |
| NO: 2033 | mutS homolog 2, colon | ACCAGGGACATAGAA |
| | cancer, nonpolyposis type 1 | TGGGATGATTGGCCC |
| | (E. coli) | GAGGTAACCATGGTT |
| | (MSH2) gene, complete cds | |
| SEQ ID | GI 654825051 NG_029042 Homo sapiens | CTCCCAGGGGAATTT |
| NO: 2034 | prolactin receptor | GGCAATGTCTGGAGA |
| | (PRLR), RefSeqGene on chromosome 5 | CACTTTTTATTGTCA |
| | | TGACTGGGGAGTTGC |
| SEQ ID | GI 237858776 NG_012127 Homo sapiens | AGGCGAAGGAGATAG |
| NO: 2035 | solute carrier family 2 member 4 | AAGGAGAGGCAGGAG |
| | (SLC2A4), RefSeqGene on chromosome 17 | AGATAGGTAAGGCCA |
| | | GAGATCGGATAAGAG |
| SEQ ID | GI 224967082 NG_011581 Homo sapiens | GAAGGTCTGAGACAC |
| NO: 2036 | thyroid peroxidase | CCATCGGCCAACCCT |
| | (TPO), RefSeqGene on chromosome 2 | AACTCATCCTGTCTT |
| | | CTCTCTCTAGTTCAC |
| SEQ ID | GI 299758401 NM_000143 Homo sapiens | GTCTGGGAGAATTGA |
| NO: 2037 | fumarate hydratase | TCTTGCCTGAAAATG |
| | (FH), mRNA | AACCAGGAAGCAGTA |
| | | TCATGCCAGGCAAGG |
| SEQ ID | GI 1002635078 NM_006256 Homo sapiens | CATGTTTCCAAACCA |
| NO: 2038 | protein kinase N2 | AAGAGCATGTTTGCT |
| | (PKN2), transcript variant 1, mRNA | TTGTAATGGAATATG |
| | | CTGCCGGTGGGGACC |
| SEQ ID | GI 21927971 AY113189 Homo sapiens | TCACTCAGGGTGATG |
| NO: 2039 | OCT-1 protein | TTGGGCTCGCTATGG |
| | (POU2F1) mRNA, complete cds | GGAAACTATATGGAA |
| | | ATGACTTCAGCCAAA |
| SEQ ID | GI 256017191 NM_002977 Homo sapiens | AAGAAGGGCCAACTA |
| NO: 2040 | sodium voltage-gated | AATTAGGATGGCCAG |
| | channel alpha subunit 9 | GGAATTGGCCTGGGT |
| | (SCN9A), mRNA | TTAGGACCTATGTAT |
| SEQ ID | GI 1049011036 AH002959 Homo sapiens | CAGTCGGATGTCTAC |
| NO: 2041 | RAF1 | TCCTATGGCATCGTA |
| | (RAF1) gene, complete cds | TTGTATGAACTGATC |
| | | ACGGGGGAGCTTCCT |
| SEQ ID | GI 237820683 NG_012068 Homo sapiens | AAATATAGCGAAATC |
| NO: 2042 | forkhead box 11 | TCTCCACTGCCTTCT |
| | (FOXIl), RefSeqGene on chromosome 5 | GTCCACCAACATTTA |
| | | GTGCCAGCCTAGGCA |
| SEQ ID | GI 211064488 NG_008914 Homo sapiens | AAATCCAAGTGACCA |
| NO: 2043 | heat shock protein family E | GGGAAGTTAAAAGTA |
| | (HsplO) member 1 | TTCCTGACGGTGCAA |
| | (HSPE1), RefSeqGene on chromosome 2 | AAAGCCGCTCAGCAA |
| SEQ ID | GI 225735577 NG_011719 Homo sapiens | GTCATCACGGATGGA |
| NO: 2044 | integrin subunit alpha M | GAAAAGTTTGGCGAT |
| | (ITGAM), RefSeqGene on chromosome 16 | CCCTTGGGATATGAG |
| | | GATGTCATCCCTGAG |
| SEQ ID | GI 757813200 NG_012843 Homo sapiens | GTCCTGGGTCATTCT |
| NO: 2045 | lipin 1 | CTTCCAAACAGGAGA |
| | (LPIN1), RefSeqGene on chromosome 2 | TCCATCATTGTCACG |
| | | GCTCTGCAGTGTAAT |
| SEQ ID | GI 908212454 NG_042284 Homo sapiens | TTCTGTGAATCCCGG |
| NO: 2046 | SMAD family member 1 | AGTCTGCAAATGAGT |
| | (SMAD1), RefSeqGene on chromosome 4 | TATAGAAAGCTGTTG |
| | | AGGCCTGAGGTGCTT |
| SEQ ID | GI 298160932 NG_021435 Homo sapiens | TAGTAGGCTTGCAGC |
| NO: 2047 | vesicle associated membrane protein 7 | CCCAGTTGGTTAGCA |
| | (VAMP7), RefSeqGene on chromosome X and Y | TGACTAACAGTCCAC |
| | | AGAATGAGTTGGATG |
| SEQ ID | GI 189339276 NM_001204 Homo sapiens | TAATGGCAGTAACAG |
| NO: 2048 | bone morphogenetic protein receptor type 2 | GGCAGTTCATTCCAA |
| | (BMPR2), mRNA | ATCCAGCACTGCTGT |
| | | TTACCTTGCAGAAGG |
| SEQ ID | GI 558472802 NM_001042600 Homo sapiens | GGCACTGAAGATGGT |
| NO: 2049 | mitogen-activated protein | GAAGATGGAGCCTGA |
| | kinase kinase kinase kinase 1 | TGATGATGTCTCCAC |
| | (MAP4K1), transcript variant 1, | CCTTCAGAAGGAAAT |
| SEQ ID | GI 19072753 AF475085 Homo sapiens | TTACTTAGGTTACTG |
| NO: 2050 | mucolipin-3 | CTTCTGTGGATGGAT |
| | (MCOLN3) mRNA, complete cds | CGTGCTGGGGCCTTA |
| | | CCATGACAAGTTTCG |
| SEQ ID | GI 570359552 NM_001288718 Homo sapiens | TTTCACTCCGGAGTG |
| NO: 2051 | signal transducer and | AGAAGCTTTGCCCTC |
| | activator of transcription 5A | CTAAGAGAGAGAGAC |
| | (STAT5A), transcript variant 1, mRNA [symbol] | AGAGAGACAGAGAGA |
| SEQ ID | GI 269846911 NM_001167942 Homo sapiens | CTTCAAGAACGTACA |
| NO: 2052 | TNF alpha induced protein 8 like 1 | TGGATCCTGATTTTC |
| | (TNFAIP8L1), transcript variant 1, mRNA | TCACGAAGTCCCGAT |
| | | GGAACCCTGTGCTGT |
| SEQ ID | GI 577019603 NG_033914 Homo sapiens | CAGGCCCCAGACTGT |
| NO: 2053 | CD207 molecule | GTAAATGTCTGAGTG |
| | (CD207), RefSeqGene on chromosome 2 | GCATGATCAGCTATC |
| | | AAGTCTCCAAGTCAC |
| SEQ ID | GI 818213488 NG_042142 Homo sapiens | TTTTGTGCCTGTTTG |
| NO: 2054 | inositol 1,4,5-trisphosphate receptor type 2 | CCTTTGCTCATCCTG |
| | (ITPR2), RefSeqGene on chromosome 12 | TGTTATCTGCCTGGA |
| | | ATGTCTTCCCTCATT |
| SEQ ID | GI 285026427 NG_016458 Homo sapiens | TGTTCTTCCTCCTTT |
| NO: 2055 | protein kinase AMP-activated | CCCCAGGTGTGTTTC |
| | non-catalytic subunit gamma 3 | CCTCACCTCCAATTT |
| | (PRKAG3), RefSeqGene on chr [symbol] | CCTCTTTTCAGAAGT |
| SEQ ID | GI 345842421 NG_029949 Homo sapiens | AAAGAAACTGCCCTT |
| NO: 2056 | TNF superfamily member 13 | GTTGGGCCCTCAAAG |
| | (TNFSF13), RefSeqGene on chromosome 17 | GACAGCCCTGGTGGT |
| | | ATTAAAATAAAGACG |
| SEQ ID | GI 219521851 NG_009233 Homo sapiens | ACTCATTGCTCTCAA |
| NO: 2057 | tyrosine 3-monooxygenase/tryptophan | ATTACCTGTCTGTCT |
| | 5-monooxygenase activation protein epsilon | TCACTGCTCCTCTCA |
| | (YWHA [symbol] | GGAGACCCCTATGCT |
| SEQ ID | GI 164698262 AK314515 Homo sapiens | CCTACAAAAAATGGC |
| NO: 2058 | cDNA, FLI95334, Homo sapiens | GTGGAACCAAAGCGA |
| | protein inhibitor of activated STAT, 1 | CCCAGCCGACCAATT |
| | (PIAS1), mRNA | AATATCACCTCACTT |
| SEQ ID | GI 2304970 U82828 Homo sapiens | AAATGGTGAGCAGAG |
| NO: 2059 | ataxia telangiectasia | GACTCATTTCCCAAA |
| | (ATM) gene, complete cds | GACAGCTGGAACAGA |
| | | AATAGGCACTCCAGA |
| SEQ ID | GI 148733545 EF636667 Homo sapiens | CTGTTGTCTTTGATC |
| NO: 2060 | caspase 4, apoptosis- | CACTCCAGGTGGGGA |
| | related cysteine peptidase | GGGACGACCTCAGAA |
| | (CASP4) gene, complete cds | CAGTAATTCACAATG |
| SEQ ID | GI 57165045 AY864066 Homo sapiens | ATCGTATGGGACCTT |
| NO: 2061 | cyclin B2 | TGGCACTTGATTTAG |
| | (CCNB2) gene, complete cds | TCTGGTCTCAGGGCC |
| | | AGAATCATCTTGCAT |
| SEQ ID | GI 83026426 DQ301957 Homo sapiens | AGGCAGACATCAGCT |
| NO: 2062 | dual specificity phosphatase 1 | CCTGGTTCAACGAGG |
| | (DUSP1) gene, complete cds | CCATTGACTTCATAG |
| | | GTAAATGGAATGGAT |
| SEQ ID | GI 1036032759 AH002916 Homo sapiens | AGGTTTGCTGTACTT |
| NO: 2063 | ornithine aminotransferase | AGTCGCGGAGTTCAT |
| | (OAT) gene, complete cds | TCTTCAGTGGCTTCT |
| | | GCTACATCTGTTGCA |
| SEQ ID | GI 21105786 AF512504 Homo sapiens | GAGACTGGAGTATGT |
| NO: 2064 | X-ray repair complementing defective | GATGATGCCACACAC |
| | repair in Chinese hamster cells 1 | TAAAGGTGTGCTTCT |
| | (XRCC1) gene, complete | TGCCCAGGTAACTGT |
| SEQ ID | GI 189571639 NG_007991 Homo sapiens | TGATGACACTGGGTG |
| NO: 2065 | acyl-CoA dehydrogenase, | ACTCTGATCATCCAG |
| | C-2 to C-3 short chain | AATAACCCTCACATC |
| | (ACADS), RefSeqGene on chromosome 12 | TCCAGACGCTTCACT |
| SEQ ID | GI 184160977 NG_007553 Homo sapiens | GGGAAGAATTGATTG |
| NO: 2066 | actin, alpha, cardiac muscle 1 | TTGGATGGCTCCCAC |
| | (ACTC1), RefSeqGene on chromosome 15 | CTTCCAGCTCAGGAG |
| | | TTTTGATTTGACAGG |
| SEQ ID | GI 289666799 NG_016606 Homo sapiens | CTGTCAGCTGAAGTA |
| NO: 2067 | glycerol-3-phosphate dehydrogenase 2 | GGATGGCTTTAGCTC |
| | (GPD2), RefSeqGene on chromosome 2 | AGGGGGCTACTCAAC |
| | | ATTTGCTGTCATCTT |
| SEQ ID | GI 291084780 NG_016747 Homo sapiens | CAGGAACTGCCTTAT |
| NO: 2068 | PPARG coactivator 1 beta | TAACCCAGTCCCTCA |
| | (PPARGC1B), RefSeqGene on chromosome 5 | TGAAAATGGAGGTGA |
| | | AATTGGCCTGCTGTG |
| SEQ ID | GI 908673232 NG_042289 Homo sapiens | CTCTTACCAGATTTC |
| NO: 2069 | sodium voltage-gated channel | AATGGAGATGCTGGA |
| | alpha subunit 3 | GGATTCCTCTGGAAG |
| | (SCN3A), RefSeqGene on chromosome 2 | GCAAAGAGCCGTGAG |
| SEQ ID | GI 1027250680 NG_047105 Homo sapiens | AGGCAATTTGATTTA |
| NO: 2070 | slit guidance ligand 2 | GATGAGGTAATGGGC |
| | (SLIT2), RefSeqGene on chromosome 4 | CAGGGGCTCTCATGA |
| | | TGGGATCGATGTCTT |
| SEQ ID | GI 197313788 NM_001423 Homo sapiens | TTCCTGGTTAAGCAG |
| NO: 2071 | epithelial membrane protein 1 | GCATTGCTTTGCCCT |
| | (EMP1), mRNA | GGAGCAGCTATTTTA |
| | | AGCCATCTCAGATTC |
| SEQ ID | GI 38016940 NM_014365 Homo sapiens | GTTCTGCTTCTCCCT |
| NO: 2072 | heat shock protein family B | GCAGAAAAGCAGCAT |
| | (small) member 8 | TTTCGGAAGCTGAAG |
| | (HSPB8), mRNA | AATAAGCTAGCCCAG |
| SEQ ID | GI 93009032 DQ464902 Homo sapiens | CCAAAACTTGGCAAG |
| NO: 2073 | nexilin | GGTGATGTAAAGGAT |
| | (NEXN) mRNA, complete cds | AAGTTTGAAGCCATG |
| | | CAGAGAGCCAGGGAA |
| SEQ ID | GI 21927971 AY113189 Homo sapiens | CAACAACTGCAACAG |
| NO: 2074 | OCT-1 protein | CTTCAACAGCAGAAT |
| | (POU2F1) mRNA, complete cds | CTCAACCTGCAACAG |
| | | TTTGTGTTGGTGCAT |
| SEQ ID | GI 375151559 NM_005651 Homo sapiens | AAAGACACTTCTGGA |
| NO: 2075 | tryptophan 2,3-dioxygenase | ATTAGTGGAGGCATG |
| | (TD02), mRNA | GCTGGAAAGAACTCC |
| | | AGGTTTAGAGCCACA |
| SEQ ID | GI 1036032812 AH005421 Homo sapiens | TGAAATCTGAAGACC |
| NO: 2076 | CD19 | TCGAGCAGATGATGC |
| | (CD19) gene, complete cds | CAACCTCTGGAGCAA |
| | | TGTTGCTTAGGATGT |
| SEQ ID | GI 267844874 NG_015840 Homo sapiens | TCTGTATGTCATGCT |
| NO: 2077 | interferon gamma | TCTTCCGTAGGTTTG |
| | (IFNG), RefSeqGene on chromosome 12 | GCTTGCATGATGTCA |
| | | GGAGTTCCGGAAGTC |
| SEQ ID | GI 194018568 NG_008185 Homo sapiens | GAATGCAGTGCAGGG |
| NO: 2078 | lactate dehydrogenase A | TTGGATTAACAAGGT |
| | (LDHA), RefSeqGene on chromosome 11 | GGAAAGAATTCGAGG |
| | | GTTCCACCAAGTAGC |
| SEQ ID | GI 342307076 NG_029608 Homo sapiens | AGGGTATAGGCTTAA |
| NO: 2079 | phospholipase D2 | GGTCAGGAAGACCTG |
| | (PLD2), RefSeqGene on chromosome 17 | GACCCAAATCCTGGA |
| | | CTCCTCAATGAGAAG |
| SEQ ID | GI 364023822 NM_130898 Homo sapiens | GTCTCTTGACTCTTT |
| NO: 2080 | cAMP responsive element | CCGCCTTTGTTTACA |
| | binding protein 3 like 4 | ACCCTGCCATGATCT |
| | (CREB3L4), transcript variant 1, mRNA | CCCTCTTGCAAAAGC |
| SEQ ID | GI 227430281 NM_182983 Homo sapiens | CCCATAATCAGCAAT |
| NO: 2081 | hepsin | GATGTCTGCAATGGC |
| | (HPN), transcript variant 1, mRNA | GCTGACTTCTATGGA |
| | | AACCAGATCAAGCCC |
| SEQ ID | GI 117606585 EF064767 Homo sapiens | AGAAGGTCCATGTGG |
| NO: 2082 | chemokine | CTGGGACAAAATGAT |
| | (C-C motif) ligand 17 | ATAGTGGGTGATGGA |
| | (CCL17) gene, complete cds | GCTGGAGGAAAAAGT |
| SEQ ID | GI 219842221 NG_009291 Homo sapiens | TGTGTGTTGCATGAG |
| NO: 2083 | albumin | AAAACGCCAGTAAGT |
| | (ALB), RefSeqGene on chromosome 4 | GACAGAGTCACCAAA |
| | | TGCTGCACAGAATCC |
| SEQ ID | GI 798958230 NG_042077 Homo sapiens | GATGTGTGATATCAT |
| NO: 2084 | enoyl-CoA hydratase, short chain 1 | CTATGCCGGTGAGAA |
| | (ECHS1), RefSeqGene on chromosome 10 | GGCCCAGTTTGCACA |
| | | GCCGGAGATCTTAAT |
| SEQ ID | GI 336285267 NG_029154 Homo sapiens | TGGAGCCTAAGGTTT |
| NO: 2085 | interferon alpha 2 | AGGCTCACCCATTTC |
| | (IFNA2), RefSeqGene on chromosome 9 | AACCAGTCTAGCAGC |
| | | ATCTGCAACATCTAC |
| SEQ ID | GI 684179348 NG_034249 Homo sapiens | CCCACTTTACAGAGG |
| NO: 2086 | transmembrane protein 173 | AGGACACTGAGGCTC |
| | (TMEM173), RefSeqGene on chromosome 5 | AGAGACACCGTAGGA |
| | | AAGTGGACGATTTAA |
| SEQ ID | GI 217416377 NM_138394 Homo sapiens | TGGCTATGGATCCCA |
| NO: 2087 | heterogeneous nuclear | TGGTCCATTATTGCC |
| | ribonucleoprotein L like | TTTACCAAGTCGTTA |
| | (HNRNPLL), transcript variant 1, mRNA | CAGAATGGGCTCTCG |
| SEQ ID | GI 187763976 EU518415 Homo sapiens | ATGCTGTATGGCCTG |
| NO: 2088 | serum/glucocorticoid | CCGCCTTTTTATAGC |
| | regulated kinase 1 isoform 2 | CGAAACACAGCTGAA |
| | (SGK1) mRNA, complete cds | ATGTACGACAACATT |
| SEQ ID | GI 41349444 NM_014011 Homo sapiens | GTAAACTCTCCGGTC |
| NO: 2089 | suppressor of cytokine signaling 5 | CCCAAAGGTTGTTAA |
| | (SOCS5), transcript variant 1, mRNA | CTAGGTCCGCTTTCA |
| | | TGTGCATCAGACAGT |
| SEQ ID | GI 356460958 NG_030484 Homo sapiens | AAAACAGAAAGAACC |
| NO: 2090 | adenosine kinase | CAGTGGCCCAACTGA |
| | (ADK), RefSeqGene on chromosome 10 | ATGGAGACAAAGCCA |
| | | AGGTGGCTAGAATTT |
| SEQ ID | GI 259013220 NG_012921 Homo sapiens | TTCTGCTAGGCTAGC |
| NO: 2091 | bisphosphoglycerate mutase | AAAAGGGAGAATAGC |
| | (BPGM), RefSeqGene on chromosome 7 | CTAGGTCCGTGGATG |
| | | ATGTTTTGATGCACG |
| SEQ ID | GI 379642970 NG_032137 Homo sapiens | TGACATTCAGAAAGG |
| NO: 2092 | collagen type IV alpha 2 chain | CTGACCCAGCTTTGG |
| | (COL4A2), RefSeqGene on chromosome 13 | AACTCTGCTTGGTTT |
| | | GTTTGTTCGTTCCTT |
| SEQ ID | GI 336391122 NG_029141 Homo sapiens | TATTTGACATCCTGG |
| NO: 2093 | interferon gamma inducible protein 16 | GGTTACAGCACGCTA |
| | (IFI16), RefSeqGene on chromosome 1 | AAGGGCACCCACTGT |
| | | CCTTAACAGAGAAAA |
| SEQ ID | GI 224809429 NG_011538 Homo sapiens | CACCTCTACATCCTC |
| NO: 2094 | potassium voltage-gated | TGCATTCTTGGCCAG |
| | channel interacting protein 1 | GCTCTGAGAGGGCAT |
| | (KCNIP1), RefSeqGene on chromoso [symbol] | TGGTAAATGTTAACT |
| SEQ ID | GI 269954733 NG_016014 Homo sapiens | AACCACCAGCACCTT |
| NO: 2095 | membrane spanning 4-domains A2 | GTGCTCATGTACTTG |
| | (MS4A2), RefSeqGene on chromosome 11 | CCCATGTCTGATGGA |
| | | AGAAACATACTCTCT |
| SEQ ID | GI 338968872 NG_029246 Homo sapiens | TTGAAGCCCAGGCGG |
| NO: 2096 | RAR related orphan receptor A | AGACTTCAGATTCCT |
| | (RORA), RefSeqGene on chromosome 15 | TTGCATGTAGAAGTG |
| | | TTGGCCAAAAATAGC |
| SEQ ID | GI 959241467 NG_046314 Homo sapiens | AGAATAGAATAGTAC |
| NO: 2097 | signal transducer and | CTGGAGGTGGAAAGG |
| | activator of transcription 2 | GAGACGGGAACAAAT |
| | (STAT2), RefSeqGene on chromosome 12 | GTGGGGAAAGGAGGA |
| SEQ ID | GI 343432618 NG_029713 Homo sapiens | GAGGCGTGTCCCTGG |
| NO: 2098 | synoviolin 1 | CAGAGAGAGAATGTG |
| | (SYVN1), RefSeqGene on chromosome 11 | TTCAGTGACAACAGC |
| | | TCATATTTGTTGAGT |
| SEQ ID | GI 117606583 EF064766 Homo sapiens | CTCTCAGGATCAGCC |
| NO: 2099 | chemokine | TCATTGCTTTCCATA |
| | (C-C motif) ligand 19 | GTTCAGCGACACTAA |
| | (CCL19) gene, complete cds | GCTTGGGTCAGTTCC |
| SEQ ID | GI 66841738 DQ075211 Homo sapiens | CGTTGICACTGGAGT |
| NO: 2100 | c-src tyrosine kinase | GTGTGTGCCGTGACA |
| | (CSK) gene, complete cds | CCTTTTTTCATTTAA |
| | | TACTGCGTCTGIGGG |
| SEQ ID | GI 21914799 AY131997 Homo sapiens | TAGAGTTCCCATCAC |
| NO: 2101 | tumor necrosis factor receptor | TCCACACTGTCCAGT |
| | superfamily, member 1A | GACAACTCCCAACAT |
| | (TNFRSF1A) gene, complete cds | GGAAGATCTGCTAGT |
| SEQ ID | GI 966209932 NG_033919 Homo sapiens | TTACACAGCCAACTG |
| NO: 2102 | dedicator of cytokinesis 1 | GTCAGTGGTACAGCC |
| | (DOCK1), RefSeqGene on chromosome 10 | TGGATTTCATCTCTG |
| | | GGTGTTTATTCCTGG |
| SEQ ID | GI 224809291 NG_011495 Homo sapiens | CAATGCAGCCCCATA |
| NO: 2103 | interferon induced with helicase C domain 1 | TGATTCAGCAGAAGT |
| | (IFIH1), RefSeqGene on chromosome 2 | GGGTAGCAGTTGGGT |
| | | TTGATTAGTCTTGGC |
| SEQ ID | GI 1028224162 NG_047195 Homo sapiens | CCAAGAAGCCTCCTG |
| NO: 2104 | transducin beta like 1 X-linked receptor 1 | GGCTAAGCCTGAATT |
| | (TBL1XR1), RefSeqGene on chromosome 3 | TTGTCTCTTGTCTAC |
| | | CCTGCACTACAATCA |
| SEQ ID | GI 384367978 NM_021797 Homo sapiens | ATGTCATGAACTACT |
| NO: 2105 | chitinase, acidic | GGAAGGACAATGGAG |
| | (CHIA), transcript variant 2, mRNA | CACCAGCTGAGAAGC |
| | | TCATCGTTGGATTCC |
| SEQ ID | GI 164692857 AK313058 Homo sapiens | CATCTCTGCAATAGT |
| NO: 2106 | cDNA, FU93535, Homo sapiens | CCTTGGAGGCACCAA |
| | opioid receptor, kappa 1 | AGTCAGGGAAGACGT |
| | (OPRK1), mRNA | CGATGTCATTGAGTG |
| SEQ ID | GI 187763976 EU518415 Homo sapiens | AATCATGCCAACATC |
| NO: 2107 | serum/glucocorticoid | CTGACCAAGCCCGAT |
| | regulated kinase 1 isoform 2 | CCAAGAACCTTCTGG |
| | (SGK1) mRNA, complete cds | ACTAATGATGATCCA |
| SEQ ID | GI 206597516 NM_001859 Homo sapiens | GCTATCCTGTTGGCC |
| NO: 2108 | solute carrier family 31 member 1 | TGTGTTGTGGTTTTG |
| | (SLC31A1), mRNA | AAGTTTGTACTTTCT |
| | | CTGTGGGTGCCAGTT |
| SEQ ID | GI 476704 L26336 Homo sapiens | CTGGCTCGACCGAAA |
| NO: 2109 | heat shock protein | CCAGATGGCAGAGAA |
| | (HSPA2) gene, complete cds | AGATGAGTATGAACA |
| | | CAAGCAGAAAGAGCT |
| SEQ ID | GI 209447058 NG_008718 Homo sapiens | TTGTATGTCATCCTT |
| NO: 2110 | apurinic/apyrimidinic | CAGGCCTCAACCAAC |
| | endodeoxyribonuclease 1 | TACTTGCCCTCTACC |
| | (APEX1), RefSeqGene on chromosome 14 | TGCTGAAGTTTCTGC |
| SEQ ID | GI 237874281 NG_012193 Homo sapiens | GGAGGCAGCCCACCA |
| NO: 2111 | cytochrome c oxidase subunit 6B1 | GTTATTTTTATGCCG |
| | (COX6B1), RefSeqGene on chromosome 19 | TTTAACCGTAGGAAG |
| | | TCACTTAGACACCCT |
| SEQ ID | GI 694879461 NG_031891 Homo sapiens | AACAGAGGGCGCATT |
| NO: 2112 | sodium voltage-gated | TGGAGAGGTAATGAG |
| | channel alpha subunit 10 | CTGGAGTTCATGTGT |
| | (SCN10A), RefSeqGene on chromosome 3 | TCACACTCATGGTAA |
| SEQ ID | GI 346644679 NG_029975 Homo sapiens | ATTCACTCGAAGAAA |
| NO: 2113 | transforming growth factor alpha | GCTTCCCAGAGCAGG |
| | (TGFA), RefSeqGene on chromosome 2 | TGTTAGGGTTAGACC |
| | | AGTTAGGGGGAGTAG |
| SEQ ID | GI 574289185 NG_033890 Homo sapiens | TGCCTCACATTCAGC |
| NO: 2114 | transient receptor potential | AGGTTCAAAACCAAA |
| | cation channel subfamily A member 1 | CTTCAATGCTTTCAC |
| | (TRPAl), RefSeqGene on [symbol] | GTTTCACCCTCTCCT |
| SEQ ID | GI 116734711 NM_000020 Homo sapiens | GGATGAACAGTCCTG |
| NO: 2115 | activin A receptor like type 1 | GTTCCGGGAGACTGA |
| | (ACVRL1), transcript variant 1, mRNA | GATCTATAACACAGT |
| | | GTTGCTCAGACACGA |
| SEQ ID | GI 294489317 NG_017064 Homo sapiens | ATTAGAGTTGGCCAG |
| NO: 2116 | acyl-CoA dehydrogenase family member 9 | TCACTACAACTTGCC |
| | (ACAD9), RefSeqGene on chromosome 3 | TCCCTTACGCTTTTT |
| | | CTCGAGTTGGTCACC |
| SEQ ID | GI 224451013 NG_009888 Homo sapiens | CCATGTCCTCAGGGT |
| NO: 2117 | acetyl-CoA acetyltransferase 1 | CTAGAGTGGGGGCAA |
| | (ACAT1), RefSeqGene on chromosome 11 | TTTCTTATAACCTCA |
| | | ACATTCAGGGTTGGG |
| SEQ ID | GI 198442852 NG_008474 Homo sapiens | ;TCTGGGCTGTAGTTT |
| NO: 2118 | aryl hydrocarbon receptor | CCCCATCCGTAAAAT |
| | interacting protein like 1 | GGGGATAATAGTGCC |
| | (AIPL1), RefSeqGene on chromosome 1 | TGCCTTGAATTGTCA |
| SEQ ID | GI 685156953 NG_034254 Homo sapiens | TACCATTAGGGTGAC |
| NO: 2119 | cyclin D2 | GCTCGTGTGCATCTT |
| | (CCND2), RefSeqGene on chromosome 12 | CTGTGGCTGATGGGT |
| | | AAATTAAACAGGACG |
| SEQ ID | GI 237858686 NG_012087 Homo sapiens | CTCACTGTCCCTTTC |
| NO: 2120 | interleukin 6 receptor | AGGACCAAAATACTG |
| | (IL6R), RefSeqGene on chromosome 1 | GGTGTATCCATCTGC |
| | | AGGTACCAATGGCTT |
| SEQ ID | GI 1024846802 NG_046996 Homo sapiens | GCATTAAAGCCAAAG |
| NO: 2121 | mediator complex subunit 1 | TGACTTTGCAGAAAC |
| | (MED1), RefSeqGene on chromosome 17 | CTGGGGAAAGTAGTG |
| | | GAGAAGGGCTTAGGC |
| SEQ ID | GI 254039688 NG_012344 Homo sapiens | TCTCAGAAACCACCC |
| NO: 2122 | NFKB inhibitor like 1 | CCATCCCACAGAAAT |
| | (NFKBIL1), RefSeqGene on chromosome 6 | ATCCCAACACCAAAG |
| | | AGATCAACACAGTCC |
| SEQ ID | GI 237858596 NG_012143 Homo sapiens | CAACTCAGGCACACC |
| NO: 2123 | nuclear receptor | TACACAGACGCATAA |
| | subfamily 0 group B member 2 | AACAGACTCTCCAAC |
| | (NROB2), RefSeqGene on chromosome 1 | CACCCACTTATAGCC |
| SEQ ID | GI 345110626 NM_002001 Homo sapiens | GAGTCCATGAAGAAG |
| NO: 2124 | Fc fragment of IgE receptor 1a | ATGGCTCCTGCCATG |
| | (FCER1A), mRNA | GAATCCCCTACTCTA |
| | | CTGTGTGTAGCCTTA |
| SEQ ID | GI 52694751 NM_001005340 Homo sapiens | TACACACTCATGAAC |
| NO: 2125 | glycoprotein nmb | TCCTGATGGAACAAT |
| | (GPNMB), transcript variant 1, mRNA | AACAGGCCCAAGCCT |
| | | GTGGTATGATGTGCA |
| SEQ ID | GI 57165045 AY864066 Homo sapiens | ACTTCCGCCCACCCA |
| NO: 2126 | cyclin B2 | CTACAAACGTCGAGA |
| | (CCNB2) gene, complete cds | GAAATTCGTAGATGA |
| | | GGCCTTGTCAAAATT |
| SEQ ID | GI 32891808 AY341028 Homo sapiens | CTCACCAAGTTTTTC |
| NO: 2127 | microsomal glutathione S-transferase 2 | ATGAGGACGATCCGT |
| | (MGST2) gene, complete cds | CAGCATCTGTTCTGG |
| | | TCTCTGGTTTCCCAT |
| SEQ ID | GI 212549702 NG_008951 Homo sapiens | CAGGGCTCTCCAGAA |
| NO: 2128 | ATR serine/threonine kinase | CACACAAATGGAAAC |
| | (ATR), RefSeqGene on chromosome 3 | TTGCAGGCATTTTTA |
| | | ACAGGCCCCAAATTG |
| SEQ ID | GI 221139813 NG_009361 Homo sapiens | GAAATAGCCACCATG |
| NO: 2129 | BCL2, apoptosis regulator | TAGTGGGTTCTCACC |
| | (BCL2), RefSeqGene on chromosome 18 | ACATGACAGACACGG |
| | | TGCTGCTATAAGCTT |
| SEQ ID | GI 281182565 NG_016196 Homo sapiens | GAAACCAGAGAACTC |
| NO: 2130 | endothelin 1 | TAGGTGGAATGTGGT |
| | (EDN1), RefSeqGene on chromosome 6 | AACTTTTGCCAGGGC |
| | | AGAGGGAACACCTAC |
| SEQ ID | GI 257467496 NG_012839 Homo sapiens | CAGAGTCTTCCTGAT |
| NO: 2131 | glutamate metabotropic receptor 1 | GAGGCATTTCCTGTT |
| | (GRM1), RefSeqGene on chromosome 6 | CGCCTGAGAGCAATT |
| | | CCTCACAGAAGATGG |
| SEQ ID | GI 270309111 NG_016167 Homo sapiens | GAAACAGTATGTGGG |
| NO: 2132 | glycogen synthase 2 | GTCAGACTGCATGGA |
| | (GYS2), RefSeqGene on chromosome 12 | TTCTGCTTCGACTTA |
| | | CCAGCTGTGTGTTCT |
| SEQ ID | GI 187960074 NG_007666 Homo sapiens | AGAGCTCTGGACAAG |
| NO: 2133 | HRas proto-oncogene, GTPase | CAGGCAGATCATAAG |
| | (HRAS), RefSeqGene on chromosome 11 | GACAGAGAGCTTACT |
| | | GTGCTTCTACCAACT |
| SEQ ID | GI 335892866 NG_029106 Homo sapiens | CTGCTTGGGCAAAGG |
| NO: 2134 | interferon regulatory factor 7 | GGAACATTCTCTGGG |
| | (IRF7), RefSeqGene on chromosome 11 | TCAGATTTGTGGTTT |
| | | TAGAAGCTGTTCTGG |
| SEQ ID | GI 212549771 NG_008990 Homo sapiens | GGCTGAGGTTTTTAA |
| NO: 2135 | TNF superfamily member 11 | GGGGATTAGGGAGAG |
| | (TNFSF11), RefSeqGene on chromosome 13 | CGAGGGGTTAGAAAA |
| | | TTGGGGTCATTGAGT |
| SEQ ID | GI 1013417860 NG_046847 Homo sapiens | TGGAACTGTGGTTGC |
| NO: 2136 | ubiquitin specific peptidase 7 | CGTTGAAAGACCCAG |
| | (USP7), RefSeqGene on chromosome 16 | CATGTAATATCTTTC |
| | | TGATGGCAAAGTGCG |
| SEQ ID | GI 49574531 NM_019884 Homo sapiens | CGAGAGCTGCAGATC |
| NO: 2137 | glycogen synthase kinase 3 alpha | ATGCGTAAGCTGGAC |
| | (GSK3A), mRNA | CACTGCAATATTGTG |
| | | AGGCTGAGATACTTT |
| SEQ ID | GI 18141132 AF424815 Homo sapiens | ACCCATGTTACTGGG |
| NO: 2138 | SH2 domain containing SOCS box | GAGTGATGGATAAAT |
| | protein SOCS4 mRNA, complete cds | ACGCAGCCGAAGCAC |
| | | TACTGGAAGGAAAAC |
| SEQ ID | GI 345525588 NG_029933 Homo sapiens | AGGAGAGATGTGTGG |
| NO: 2139 | interleukin 16 | GATGCTCTTTGCGGG |
| | (IL16), RefSeqGene on chromosome 15 | GCAGATGGATTAAAT |
| | | GCCACCTTATGATTA |
| SEQ ID | GI 405778361 NG_032938 Homo sapiens | GTGTACACTGCCAGG |
| NO: 2140 | semaphorin 3B | GAGGAGCCACTGTTA |
| | (SEMA3B), RefSeqGene on chromosome 3 | TTCCGACTTTACACA |
| | | TGAGCAAACTGAGTT |
| SEQ ID | GI 594591639 NG_034041 Homo sapiens | AGCAACCACAGTGAT |
| NO: 2141 | sorbin and SH3 domain containing 1 | CATCTTAACGTTGGT |
| | (SORBS1), RefSeqGene on chromosome 10 | CCAAAACCCTCTAGT |
| | | GGCTTCTCATCTCGC |
| SEQ ID | GI 388490278 NG_032761 Homo sapiens | ATGATCTTCTTCTGC |
| NO: 2142 | TNF alpha induced protein 3 | CAGCTCAACTGAAAC |
| | (TNFAIP3), RefSeqGene on chromosome 6 | CCAGGAGGTTTCCTG |
| | | AAGGTGAAACCAAGA |
| SEQ ID | GI 343887349 NG_029780 Homo sapiens | TAAAGTCTCATGCCT |
| NO: 2143 | X-ray repair cross complementing 5 | CCAGGCGTTTGTGCA |
| | (XRCC5), RefSeqGene on chromosome 2 | TCCCATTTTCTCTGC |
| | | AGAGTAGAATCTCCC |
| SEQ ID | GI 22035651 NM_014349 Homo sapiens | CTCAGAAAAGAAACG |
| NO: 2144 | apolipoprotein L3 | CTTTACTGAAGAGGC |
| | (APOL3), transcript variant | CACCAAATACTTCCG |
| | alpha/a, mRNA | GGAGAGAGTCAGCCC |
| SEQ ID | GI 1010228574 NM_001321573 Homo sapiens | GAGCTTATGATTTTC |
| NO: 2145 | calcium/calmodulin dependent | CATCACCAGAATGGG |
| | protein kinase II delta | ACACGGTGACTCCTG |
| | (CAMK2D), transcript variant 14, [symbol] | AAGCCAAAGACCTCA |
| SEQ ID | GI 296010927 NM_172213 Homo sapiens | CCCTGCATACATAAA |
| NO: 2146 | CD8b molecule | GGTGCAAACCAACAA |
| | (CD8B), transcript variant 2, mRNA | GATGGTGATGCTGTC |
| | | CTGCGAGGCTAAAAT |
| SEQ ID | GI 387598072 NM_005277 Homo sapiens | TGTGGCAGATGTGTG |
| NO: 2147 | glycoprotein M6A | AGCGCTTGGTTCATT |
| | (GPM6A), transcript variant 1, mRNA | ATGCTGACATATCTT |
| | | TTCATGTTGGCCTGG |
| SEQ ID | GI 544709854 NM_001039845 Homo sapiens | TGCTCATGAGTCTGT |
| NO: 2148 | malate dehydrogenase 1B | CAGAGTCATCGTGGG |
| | (MDH1B), transcript variant 1, mRNA | AGGGAGAACCTTTGT |
| | | AAACCTGAAGACAGT |
| SEQ ID | GI 899148489 NM_001135690 Homo sapiens | CCTCCCTCCATCCTC |
| NO: 2149 | proenkephalin | CAGTGGGAAACTGTT |
| | (PENK), mRNA | GATGGTGTTTTATTG |
| | | TCATGTGTTGCTTGC |
| SEQ ID | GI 315360639 NM_012474 Homo sapiens | CGTTCGTCAAGCCTG |
| NO: 2150 | uridine-cytidine kinase 2 | CCTTTGAGGAATTCT |
| | (UCK2), mRNA | GCTTGCCAACAAAGA |
| | | AGTATGCTGATGTGA |
| SEQ ID | GI 1147489694 NG_016780 Homo sapiens | TATCTTGTTTTATAG |
| NO: 2151 | acyl-CoA thioesterase 9 | GCTTTGTGCCTTGGG |
| | (ACOT9), RefSeqGene on chromosome X | CAAAGGGCAGCTTAC |
| | | TCCTGGAAGAGGACT |
| SEQ ID | GI 343790959 NG_029764 Homo sapiens | CAGTCTGACAACATT |
| NO: 2152 | AKT serine/threonine kinase 3 | CCCTCTCTCTCTTCA |
| | (AKT3), RefSeqGene on chromosome 1 | TTCTCTGCATTGGCA |
| | | CCTTGACTTGCTGGT |
| SEQ ID | GI 291219938 NG_016779 Homo sapiens | TGAACAAAATCTGGT |
| NO: 2153 | interleukin 2 | GCCAGAAAGAGCTTG |
| | (IL2), RefSeqGene on chromosome 4 | TGCCAGGGTGAATCC |
| | | AAGCCCAGAAAATAA |
| SEQ ID | GI 975830227 NG_021386 Homo sapiens | AGTTGCCATGACCAG |
| NO: 2154 | TGF-beta activated kinase | AGCTTACTGAGATTA |
| | 1/MAP3K7 binding protein 2 | TGTGGTGAGGTCACC |
| | (TAB2), RefSeqGene on chromosome | TGAGTCAGGAACAGA |
| SEQ ID | GI 397938 Z22576 H. sapiens | CTGTGGGCTTTTATT |
| NO: 2155 | CD69 gene | GCCATGAGCTAGAAG |
| | | CATCACAGGTTGACC |
| | | AATAACCATGCCCAA |
| SEQ ID | GI 189181756 NM_001710 Homo sapiens | TTCCTTTGTACTGGA |
| NO: 2156 | complement factor B | GGAGTGAGTCCCTAT |
| | (CFB), mRNA | GCTGACCCCAATACT |
| | | TGCAGAGGTGATTCT |
| SEQ ID | ref \| NM_033229.2\| Homo sapiens | GTCTGCAGGTGTGAG |
| NO: 2157 | tripartite motif containing 15 | ATGAAGACTTTTGTG |
| | (TRIM15), mRNA | AGTCCTGAGGCCATT |
| | | TCTCCTGACCTTGTC |
| SEQ ID | GI 212549766 NG_008985 Homo sapiens | TGCCTGCGTATGGCT |
| NO: 2158 | N-acylsphingosine amidohydrolase 1 | ATAAATACTAAGGGG |
| | (ASAH1), RefSeqGene on chromosome 8 | AGTGTCAGGAGATGA |
| | | GGCTGGGATGGTAAG |
| SEQ ID | GI 326537295 NG_028240 Homo sapiens | TGTCAGGAAGAGGTA |
| NO: 2159 | cell division cycle 6 | TCCAGGCCAGCTGGG |
| | (CDC6), RefSeqGene on chromosome 17 | AAGGACATGATGAGG |
| | | AAATTGGAAAAACAT |
| SEQ ID | GI 344313160 NG_029811 Homo sapiens | ACACATTACCATCCA |
| NO: 2160 | carbohydrate sulfotransferase 1 | GTGTTCACAACACCC |
| | (CHST1), RefSeqGene on chromosome 11 | CTACAGGGTGAGGAT |
| | | CAGTACCTCTGTCTT |
| SEQ ID | GI 325995139 NG_008854 Homo sapiens | TAAGTCACTCAGTCT |
| NO: 2161 | potassium voltage-gated | CCTTCATCCAGGGTT |
| | channel subfamily Q member 3 | GGGACAGAGTCAGAC |
| | (KCNQ3), RefSeqGene on chromos [symbol] | TGGCTGATGCATTAG |
| SEQ ID | GI 1028630729 NG_050573 Homo sapiens | GTTTTGGTATCAGTG |
| NO: 2162 | NLR family pyrin domain containing 6 | TCACAGGCCTCAGAG |
| | (NLRP6), RefSeqGene on chromosome 11 | AATGAGTTGGGAAGC |
| | | ATTCCCTTGAGAGCT |
| SEQ ID | GI 1099522105 NG_052009 Homo sapiens | GTCATTCATCCTGTC |
| NO: 2163 | salt inducible kinase 1 | AATCAAGCGAGTGGG |
| | (SIK1), RefSeqGene on chromosome 21 | AATGGGGTGTGCATT |
| | | CTCTATTACCCAGGT |
| SEQ ID | GI 294459987 NG_017046 Homo sapiens | AGCAGTTGCATCCTT |
| NO: 2164 | spleen associated tyrosine kinase | CATGGCCATGACTTT |
| | (SYK), RefSeqGene on chromosome 9 | TGCTCTCTCCTTCCT |
| | | TTCTGGGAGATGTAT |
| SEQ ID | GI 1024336762 NG_046896 Homo sapiens | CGCACTTAAGAGTCC |
| NO: 2165 | TNF receptor superfamily member 4 | TGGGATCTGAATGAG |
| | (TNFRSF4), RefSeqGene on chromosome 1 | AATGACCACAGCGAC |
| | | TTCATGTAACGTGGC |
| SEQ ID | GI 32140476 AY316305 Homo sapiens | TGGTGGGAAGATTCA |
| NO: 2166 | glutathione transferase zeta 1 | TGAGTGCTAATCACT |
| | (maleylacetoacetate isomerase) | GGCGAGTCTTTCCTG |
| | (GSTZ1) gene, complete cds | GGTTCCACTTTGAAA |
| SEQ ID | GI 379991110 NG_032143 Homo sapiens | GACAGGGACTGTGGC |
| NO: 2167 | aconitase 2 | TTATTTATTCCTCTC |
| | (ACO2), RefSeqGene on chromosome 22 | TAGCTCTGGGTTTGG |
| | | GACCAGGTCAGTACA |
| SEQ ID | GI 184160977 NG_007553 Homo sapiens | TTCCTTTATTCACTT |
| NO: 2168 | actin, alpha, cardiac muscle 1 | TGGCAGCAGGGGATC |
| | (ACTC1), RefSeqGene on chromosome 15 | CTTTTCTGGCCTGAA |
| | | GACCAGAGTCTGAAT |
| SEQ ID | GI 696221409 NG_041768 Homo sapiens | CATCTGCTTTCATGC |
| NO: 2169 | CD24 molecule | CCCTGAATTTCTTTG |
| | (CD24), RefSeqGene on chromosome 6 | AGACCCTTCAAGTGC |
| | | ATTCCGAGGTGGTTC |
| SEQ ID | GI 343098522 NG_029664 Homo sapiens | TAGCCACTTCTGACT |
| NO: 2170 | cathepsin E | CAAGCTGCCCTTCTA |
| | (CTSE), RefSeqGene on chromosome 1 | GGTTTAGACCACTCT |
| | | CCCCAGTGAAAGATC |
| SEQ ID | GI 342307067 NG_029605 Homo sapiens | CAATGGGATACAAAA |
| NO: 2171 | interleukin 15 | GTTGGCAACACATTC |
| | (IL15), RefSeqGene on chromosome 4 | TTCCCCTTTTCTCTG |
| | | CCTGGGTGTGACCTC |
| SEQ ID | GI 1028224165 NG_047209 Homo sapiens | GAACCTGTACAGGAG |
| NO: 2172 | interleukin 33 | CACAGGAAAGAGTCA |
| | (IL33), RefSeqGene on chromosome 9 | AGGAGGAAAATGCTG |
| | | GCTTTCACATACCCT |
| SEQ ID | GI 916539820 NG_042809 Homo sapiens | TGCTAGCATGTATCA |
| NO: 2173 | potassium voltage-gated | TGTGTGTGGTGTGCA |
| | channel subfamily J member 12 | TAGCACATAGCACTG |
| | (KCNJ12), RefSeqGene on chromos [symbol] | TATGCTGGACCTGTT |
| SEQ ID | GI 480355034 KC485577 Homo sapiens | CACCTGGAAAACAAG |
| NO: 2174 | bone morphogenenic protein-5 | CGTCCTCTGCACCTC |
| | (BMP5) mRNA, complete cds | TCTTTATGCTGGATC |
| | | TCTACAATGCCATGA |
| SEQ ID | GI 45643118 NM_006117 Homo sapiens | CTGATAGCACTTTTC |
| NO: 2175 | enoyl-CoA delta isomerase 2 | AGAAAGAAGTCTGGA |
| | (ECI2), transcript variant 1, mRNA | CCAGGCTGAAGGCAT |
| | | TTGCAAAGCTTCCCC |
| SEQ ID | GI 229608964 NM_014600 Homo sapiens | TATGCATATCTTGAC |
| NO: 2176 | EH domain containing 3 | ATTGCTCTGTAGGTG |
| | (EHD3), mRNA | AGAGAGGACCATGAC |
| | | GCCCATGTTTGCAGC |
| SEQ ID | GI 21397157 AF517525 Homo sapiens | GCCAATTAAAGCCAG |
| NO: 2177 | cyclin D3 | GCCCTGATTGCTTTA |
| | (CCND3) gene, complete cds | AGGAAGGGCTGATGT |
| | | ATTTCATCCCACCTT |
| SEQ ID | GI 1168024004 KY497357 Homo sapiens | CCATAAGTGGAGTCC |
| NO: 2178 | HLA-DRA | CTGTGCTAGGATTTT |
| | (HLA-DRA) gene, complete cds | TCATCATAGCTGTGC |
| | | TGATGAGCGCTCAGG |
| SEQ ID | GI 1025608661 NG_047049 Homo sapiens | ATCCTACACTGAAAG |
| NO: 2179 | fatty acid binding protein 3 | CTCTTGGGTCTGGCT |
| | (FABP3), RefSeqGene on chromosome 1 | GTTCTCTGTGAAATG |
| | | CTGTAGTCTCTCCCT |
| SEQ ID | GI 207440658 NG_008647 Homo sapiens | CCCCTGTTGCGAAGG |
| NO: 2180 | GTP cyclohydrolase 1 | AAGATCCCTTATCTC |
| | (GCH1), RefSeqGene on chromosome 14 | TTCATCTGTCACTAA |
| | | TGATGGTGGCTTGCG |
| SEQ ID | GI 628601932 NG_034128 Homo sapiens | TCCACAAAAATTGCT |
| NO: 2181 | guanylate cyclase 1 soluble subunit alpha | CTCCCACTTGGTCCT |
| | (GUCY1A3), RefSeqGene on chromosome 4 | GTCCTAAGGCCTAAA |
| | | TCTCCTTTGGGTTGA |
| SEQ ID | GI 342307067 NG_029605 Homo sapiens | GCCATGTGAGTTTGG |
| NO: 2182 | interleukin 15 | ACACTGGGGTCTTGG |
| | (IL15), RefSeqGene on chromosome 4 | TCATTATGACATGCC |
| | | TATGCTCTAGGTAGC |
| SEQ ID | GI 325995139 NG_008854 Homo sapiens | ACCAAGTCTAAGGCA |
| NO: 2183 | potassium voltage-gated | GGGAGGATAAGAAAC |
| | channel subfamily Q member 3 | ATTGTCCCATTGAAC |
| | (KCNQ3), RefSeqGene on chromos [symbol] | AGCTGAGGAAGCAGG |
| SEQ ID | GI 908212441 NG_042288 Homo sapiens | TTGGAAACTCAGGCA |
| NO: 2184 | methylsterol monooxygenase 1 | GGGTTTCAGTGTTGC |
| | (MSM01), RefSeqGene on chromosome 4 | AGTCTCGAGAATCCT |
| | | TCTTCAGGAAACCTC |
| SEQ ID | GI 344925888 NG_029692 Homo sapiens | AAGCAAAAAGCCACA |
| NO: 2185 | 2′-5′-oligoadenylate synthetase 2 | GGTCATTAGGAAGTG |
| | (OAS2), RefSeqGene on chromosome 12 | ATGCTCCAACTGGGC |
| | | ATGGAAAAGGAGTTT |
| SEQ ID | GI 224967082 NG_011581 Homo sapiens | GTGGTTGCTGTTAAC |
| NO: 2186 | thyroid peroxidase | ACTATTGCATGACTC |
| | (TPO), RefSeqGene on chromosome 2 | CTGACCATAGGCTCT |
| | | GCCACTGACACTTCA |
| SEQ ID | GI 874507494 NG_042223 Homo sapiens | TTGGCCTAAGAGGCT |
| NO: 2187 | tubulin beta 2A class Ila | ACTCACAGACATCTG |
| | (TUBB2A), RefSeqGene on chromosome 6 | GCTTTAGTTTCCACC |
| | | TCCGATACAGACCAA |
| SEQ ID | GI 1047225539 NM_001201 Homo sapiens | ATTGAACCTCGGAAT |
| NO: 2188 | bone morphogenetic protein 3 | TGCGCCAGGAGATAC |
| | (BMP3), mRNA | CTCAAGGTAGACTTT |
| | | GCAGATATTGGCTGG |
| SEQ ID | GI 1049017896 NM_002192 Homo sapiens | TGGAAGGAGGGCAGA |
| NO: 2189 | inhibin beta A subunit | AATGAATGAACTTAT |
| | (INHBA), mRNA | GGAGCAGACCTCGGA |
| | | GATCATCACGTTTGC |
| SEQ ID | GI 91984778 NM_002214 Homo sapiens | GACAACTGAGTCACG |
| NO: 2190 | integrin subunit beta 8 | CACAACTCAACATGG |
| | (ITGB8), mRNA | AGCCTAACTGATTAT |
| | | CAGCTCAGATCCCGC |
| SEQ ID | GI 1002635078 NM_006256 Homo sapiens | CCCATTTCCAATCAG |
| NO: 2191 | protein kinase N2 | TCATGGGACCAGAAG |
| | (PKN2), transcript variant 1, mRNA | TTTACACTGGAACTG |
| | | GACAGGTCACGTGAA |
| SEQ ID | GI 32891806 AY340485 Homo sapiens | AGGACCATGGATGGG |
| NO: 2192 | biliverdin reductase B | AGACAGAGACCAGTG |
| | (flavin reductase | CAATGCCTGCATTAA |
| | (NADPH)) | CCCTTTAGTTGTTAG |
| | (BLVRB) gene, complete cds | |
| SEQ ID | GI 52854078 AY755659 Homo sapiens | TGCTCTGTCTCTTAC |
| NO: 2193 | small proline-rich protein 1A | CCTGGGGAGTTCATG |
| | (SPRRIA) gene, complete cds | ATCTGTAGAGGAAAA |
| | | GTGGGCTTCCTCATC |
| SEQ ID | GI 224809231 NG_011436 Homo sapiens | TAAACACAATTCACC |
| NO: 2194 | alpha 2-HS glycoprotein | TCCTCACACACTAGA |
| | (AHSG), RefSeqGene on chromosome 3 | CAGGAAACCAACGCA |
| | | GCTTGAAGCCAGTGA |
| SEQ ID | GI 1028630729 NG_050573 Homo sapiens | AAAACTTCCTAGTAT |
| NO: 2195 | NLR family pyrin domain containing 6 | GGCCCTACAGCTCTG |
| | (NLRP6), RefSeqGene on chromosome 11 | GCCCAGCCCTTCTTC |
| | | CCATTTTACTTTCTG |
| SEQ ID | GI 401709985 NG_032898 Homo sapiens | AAAAGGGAGTTCCCA |
| NO: 2196 | plasminogen activator, urokinase receptor | ACCTGCAAACAAATC |
| | (PLAUR), RefSeqGene on chromosome 19 | TCCCTCAAGTCATTG |
| | | GCAAGCTCTACATGC |
| SEQ ID | GI 365192584 NG_031951 Homo sapiens | AACTCTCCTCATATT |
| NO: 2197 | prostate transmembrane | TAAGGTCTCTGCTGA |
| | protein, androgen induced 1 | AAAGCCACCTCCTCC |
| | (PMEPA1), RefSeqGene on chromoso [symbol] | GAAAGGCTGTCCCTA |
| SEQ ID | GI 384367978 NM_021797 Homo sapiens | ATGGTTTCTACTCCT |
| NO: 2198 | chitinase, acidic | GAGAACCGCCAGACT |
| | (CHIA), transcript variant 2, mRNA | TTCATCACCTCAGTC |
| | | ATCAAATTCCTGCGC |
| SEQ ID | GI 208022628 NM_004887 Homo sapiens | CCTGGAACGAGAAGC |
| NO: 2199 | C-X-C motif chemokine ligand 14 | GCAGGGTCTACGAAG |
| | (CXCL14), mRNA | AATAGGGTGAAAAAC |
| | | CTCAGAAGGGAAAAC |
| SEQ ID | GI 194733730 NM_002993 Homo sapiens | AGCTGCGTTGCACTT |
| NO: 2200 | C-X-C motif chemokine ligand 6 | GTTTACGCGTTACGC |
| | (CXCL6), mRNA | TGAGAGTAAACCCCA |
| | | AAACGATTGGTAAAC |
| SEQ ID | GI 399567818 NM_003299 Homo sapiens | CCTGCTGCATGTCAC |
| NO: 2201 | heat shock protein 90 beta family member 1 | AGACACCGGTGTAGG |
| | (HSP90B1), mRNA | AATGACCAGAGAAGA |
| | | GTTGGTTAAAAACCT |
| SEQ ID | GI 124028520 NM_001080547 Homo sapiens | CCCTATGACACGGAT |
| NO: 2202 | Spi-1 proto-oncogene | CTATACCAACGCCAA |
| | (SPIl), transcript variant 1, mRNA | ACGCACGAGTATTAC |
| | | CCCTATCTCAGCAGT |
| SEQ ID | GI 374252456 NM_001252406 Homo sapiens | GGGGTCCCTGTCCCC |
| NO: 2203 | zinc finger and BTB domain containing 7B | AGCTGCTCCTGGGGA |
| | (ZBTB7B), transcript variant 3, mRNA | GTAGAAGCAATAATG |
| | | TATTTCTAATTTGTG |
| SEQ ID | GI 23955951 AF549495 Homo sapiens | AGTGTATTTAGTCGA |
| NO: 2204 | cyclin G2 | GACCTCTCTGCTGAG |
| | (CCNG2) gene, complete cds | CTTGCAACCTGTTTA |
| | | TTCACATGGCCTGCC |
| SEQ ID | GI 262331531 NG_013343 Homo sapiens | CCATAAGGACAGCAT |
| NO: 2205 | endothelin receptor type A | GAACTGACCACCCTT |
| | (EDNRA), RefSeqGene on chromosome 4 | AGAAGCACTCCTCGG |
| | | TACTCCCATAATCCT |
| SEQ ID | GI 239787846 NG_012306 Homo sapiens | ATCTTGGTCAGCTGA |
| NO: 2206 | interferon regulatory factor 5 | TAGTATCCGGCTACA |
| | (IRF5), RefSeqGene on chromosome 7 | GATCTCAAACCCAGA |
| | | CCTCAAAGACCGCAT |
| SEQ ID | GI 334883167 NG_029059 Homo sapiens | ACAAGTCACAGTTTC |
| NO: 2207 | mitogen-activated protein kinase 9 | TCAAGTGAGTTTGCA |
| | (MAPK9), RefSeqGene on chromosome 5 | GGCCGAAGTCCCCAG |
| | | GCAAAAGTCAAATTC |
| SEQ ID | GI 300116221 NG_023260 Homo sapiens | ATGTGGTCCCCAGTC |
| NO: 2208 | oxoglutarate dehydrogenase | ATCTCTGCTTCTAGA |
| | (OGDH), RefSeqGene on chromosome 7 | ATGTATGGAGCTCTC |
| | | AGTCCTGCTGGAAAA |
| SEQ ID | GI 401709985 NG_032898 Homo sapiens | CTTAGAACACATCTT |
| NO: 2209 | plasminogen activator, urokinase receptor | CCCCAAGAGTTCACC |
| | (PLAUR), RefSeqGene on chromosome 19 | CTGCTGGCAACTTCT |
| | | CATCCATTAGGCCTC |
| SEQ ID | GI 975830227 NG_021386 Homo sapiens | TGATGGACAACTTCA |
| NO: 2210 | TGF-beta activated kinase | AGGTGGCCAGTCCAA |
| | 1/MAP3K7 binding protein 2 | TAGTGAACTATTTCA |
| | (TAB2), RefSeqGene on chromosome [symbol] | GCAGGAGCCACAGAC |
| SEQ ID | GI 666335577 NM_006494 Homo sapiens | ACAAGCGCATTCTGC |
| NO: 2211 | ETS2 repressor factor | ACAAGACCAAGGGGA |
| | (ERF), transcript variant 1, mRNA | AACGGTTCACCTACA |
| | | AGTTCAATTTCAACA |
| SEQ ID | GI 167466188 NM_014009 Homo sapiens | TTAGAAGAGAGAGGT |
| NO: 2212 | forkhead box P3 | CTGCGGCTTCCACAC |
| | (FOXP3), transcript variant 1, mRNA | CGTACAGCGTGGTTT |
| | | TTCTTCTCGGTATAA |
| SEQ ID | GI 167234418 NM_005119 Homo sapiens | GTTTCGTTCCATTTT |
| NO: 2213 | thyroid hormone receptor | CCAGCACATACAATC |
| | associated protein 3 | AGCTCAGTCTCAGCG |
| | (THRAP3), mRNA | TAGCCCCTCAGAACT |
| SEQ ID | GI 284520137 NG_016421 Homo sapiens | CAACCAGAAAAGCAT |
| NO: 2214 | adrenoceptor beta 2 | TGGCCTTCTCTGCTT |
| | (ADRB2), RefSeqGene on chromosome 5 | CCTGTCAACTCAATG |
| | | ATGGGATGTTTGGGT |
| SEQ ID | GI 300244503 NG_023318 Homo sapiens | TTGCCAAGTACTTGC |
| NO: 2215 | Fc fragment of IgG receptor lib | TGCTCCTTCCCATGG |
| | (FCGR2B), RefSeqGene on chromosome 1 | AATACCTTTTCCCTC |
| | | TCAGCCAAAATCCTA |
| SEQ ID | GI 336088631 NG_029118 Homo sapiens | TTCTTGCCCTGGGGA |
| NO: 2216 | RAR related orphan receptor C | GAAAAAAAACTCAAA |
| | (RORC), RefSeqGene on chromosome 1 | CTATCCATGCTTAGG |
| | | GCAGGGGAGAGGTAG |
| SEQ ID | GI 260898757 NM_021571 Homo sapiens | ATGGGTTTGCACTAA |
| NO: 2217 | caspase recruitment domain | GAGAGAAGATGGAAC |
| | family member 18 | TCTGGAGCACTTCAG |
| | (CARD18), mRNA | AGACTTCCCAGAGCT |
| SEQ ID | GI 221316601 NM_001143935 Homo sapiens | AAGATCAAAAACTTA |
| NO: 2218 | carnitine O-octanoyltransferase | GCCGGGTATGGTGGT |
| | (CROT), transcript variant 1, mRNA | GCATGTGTGCCTGTA |
| | | GTCCAAGCTACTTGA |
| SEQ ID | GI 544709854 NM_001039845 Homo sapiens | TTGGATCGTGGAGGA |
| NO: 2219 | malate dehydrogenase 1B | AAGGGTTTGCTTTTG |
| | (MDH1B), transcript variant 1, mRNA | GGAGGATATAATGAG |
| | | TTCCTGGAGCATGCT |
| SEQ ID | GI 45934429 AY585238 Homo sapiens | AGTCTTTAGGGATAG |
| NO: 2220 | creatine kinase, muscle | GCCTTTTGGAGAACT |
| | (CKM) gene, complete cds | CAGTCCCAGGAAGGA |
| | | ACAGGAAAGAGGTGT |
| SEQ ID | GI 336176054 NG_029124 Homo sapiens | GTCACACAAGAAGGG |
| NO: 2221 | caspase 1 | AGGAGAGAAAAGCCA |
| | (CASP1), RefSeqGene on chromosome 11 | TGGCCGGTGAGTCTT |
| | | TTACTGTTCCAAGAA |
| SEQ ID | GI 533112518 NG_007159 Homo sapiens | GAGAACACAGTTCAT |
| NO: 2222 | chloride voltage-gated channel 5 | CATTCCCATTCAGCC |
| | (CLCN5), RefSeqGene on chromosome X | TGCCTTCATGTGTTC |
| | | AAGGGGCTGGAAAAG |
| SEQ ID | GI 190358513 NG_008045 Homo sapiens | CTGCTGGACTGAAGT |
| NO: 2223 | dihydrolipoamide dehydrogenase | TTGGAGGTGGATCTG |
| | (DLD), RefSeqGene on chromosome 7 | AGAAGGGGAGTGACA |
| | | CTGAGTTGCTAGTAT |
| SEQ ID | GI 237858687 NG_012088 Homo sapiens | TTGGGGAAACTAAGG |
| NO: 2224 | interleukin 10 | CCCAGAGACCTAAGG |
| | (IL10), RefSeqGene on chromosome 1 | TGACTGCCTAAGTTA |
| | | GCAAGGAGAAGTCTT |
| SEQ ID | GI 1027860277 NG_047185 Homo sapiens | CATCCCTATGCTCAA |
| NO: 2225 | NLR family member XI | CAAAGTTGGGTCAAG |
| | (NLRX1), RefSeqGene on chromosome 11 | CAGGTTAAGACGGCA |
| | | CATAGGTCACTGTGA |
| SEQ ID | GI 343488502 NG_029727 Homo sapiens | ATCCCAATTCCTGTC |
| NO: 2226 | platelet derived growth factor subunit A | AGGGTACTGCAACAT |
| | (PDGFA), RefSeqGene on chromosome 7 | GGCCAATGTGGCAAA |
| | | TGTGATTCTGGAAAT |
| SEQ ID | GI 574289185 NG_033890 Homo sapiens | CTGGACGGGCAACTG |
| NO: 2227 | transient receptor potential | CAGTCCAGGGAAACC |
| | cation channel subfamily A member 1 | TACTCAAAAAGTATC |
| | (TRPAl), RefSeqGene on [symbol] | TGTATCATCTGGCAC |
| SEQ ID | GI 14423572 AF388025 Homo sapiens | CTGCACCAGGCTTGT |
| NO: 2228 | colony stimulating factor 3 | CATTTACCATCTTCC |
| | (granulocyte) | ATAAACTTGAGCCCA |
| | (CSF3) gene, complete cds | TCCATCAAGTTGCCC |
| SEQ ID | GI 117606505 EF064727 Homo sapiens | ATACCATGGAAGGAA |
| NO: 2229 | inducible T-cell co-stimulator | CAAGTGCAAAGAGCC |
| | (ICOS) gene, complete cds | TGTGGCAGGAAGGAA |
| | | TGAGGTAAGGTTAGG |
| SEQ ID | GI 189339218 NG_007955 Homo sapiens | CTTACCCAAACTCTT |
| NO: 2230 | cytochrome P450 family 17 | CACAGCTGGGTTTCC |
| | subfamily A member 1 | CACGCTCTTCTTCCA |
| | (CYP17A1), RefSeqGene | ACCAACTGCAAATTC |
| | on chromosome [symbol] | |
| SEQ ID | GI 343488501 NG_029726 Homo sapiens | TTCATCCAACAAATC |
| NO: 2231 | dynamin 1 | CACTGGGCCGGAAAA |
| | (DNM1), RefSeqGene on chromosome 9 | TTTAAAGCACCTACC |
| | | CTATGCCAAGCAGTG |
| SEQ ID | GI 300244503 NG_023318 Homo sapiens | GCTTTTGACCACACA |
| NO: 2232 | Fc fragment of IgG receptor lib | GACCATGATGGGGAA |
| | (FCGR2B), RefSeqGene on chromosome 1 | GTACTGCATCTGATC |
| | | AGCAAGAGAGACAGG |
| SEQ ID | GI 162329557 NG_007161 Homo sapiens | TGAAAAGGCCCCCAA |
| NO: 2233 | MYC proto-oncogene, bHLH transcription factor | GGTAGTTATCCTTAA |
| | (MYC), RefSeqGene on chromosome 8 | AAAAGCCACAGCATA |
| | | CATCCTGTCCGTCCA |
| SEQ ID | GI 343488502 NG_029727 Homo sapiens | GTCATTGGTAAAGCA |
| NO: 2234 | platelet derived growth factor subunit A | GCTAATGCAAACGTG |
| | (PDGFA), RefSeqGene on chromosome 7 | GCTATCACAAGGCAT |
| | | CGGAAAATGGGAGCT |
| SEQ ID | GI 86278451 DQ374395 Homo sapiens | CCTTCAGAGAGAGGT |
| NO: 2235 | UDP glucuronosyltransferase 1 | GACTGTCCAGGACCT |
| | family, polypeptide A1 | ATTGAGCTCTGCATC |
| | (UGT1A1) gene, complete cds | TGTCTGGCTGTTTAG |
| SEQ ID | GI 401709984 NG_032897 Homo sapiens | AAACTTGACAAGACC |
| NO: 2236 | platelet factor 4 | AGCTCCTGAGACATG |
| | (PF4), RefSeqGene on chromosome 4 | GCACAGTGTTGACAC |
| | | CATGCTTATACCTCC |
| SEQ ID | GI 206725542 NG_008631 Homo sapiens | CTTTTTTGTATCCCA |
| NO: 2237 | patatin like phospholipase | AGGTGGCCTGTGGAC |
| | domain containing 3 | ACCCACATGGACAAA |
| | (PNPLA3), RefSeqGene on chromosome 22 | TGTTTACACTGGGAC |
| SEQ ID | GI 1147544507 NG_028250 Homo sapiens | ACCTGAGGGCTCTGA |
| NO: 2238 | PPARG coactivator 1 alpha | ATGGTCTGGGGTTTT |
| | (PPARGCIA), RefSeqGene on chromosome 4 | AAAGTAGCTACCCTT |
| | | GCGTCACAAAATGAG |
| SEQ ID | GI 899148489 NM_001135690 Homo sapiens | CAAGAGATATGGGGG |
| NO: 2239 | proenkephalin | CTTCATGAGAGGCTT |
| | (PENK), mRNA | AAAGAGAAGCCCCCA |
| | | ACTGGAAGATGAAGC |
| SEQ ID | GI 110735399 NM_001031680 Homo sapiens | CATTTGTGGAGAGAA |
| NO: 2240 | runt related transcription factor 3 | CAGGAGGGCCAGATA |
| | (RUNX3), transcript variant 1, mRNA | GATAGGTCCTAGCAG |
| | | AAGGCATTGAGGTGA |
| SEQ ID | GI 51988875 AY744675 Homo sapiens | ATCACTGGGCCATAT |
| NO: 2241 | matrix metalloproteinase 10 | ACTCAGACACTAAAA |
| | (stromelysin 2) | GACATCAGGAGAGGC |
| | (MMP10) gene, complete cds | CAGCTGAGGTCCAAA |
| SEQ ID | GI 338827643 NG_029228 Homo sapiens | ATCCATCTCTCCTAC |
| NO: 2242 | OS9, endoplasmic reticulum lectin | CAGAGTGTCCACCTT |
| | (OS9), RefSeqGene on chromosome 12 | AGGATGGTGCTCTCT |
| | | GCAGGCGAATATTTG |
| SEQ ID | GI 313747578 NM_015162 Homo sapiens | AAGTCTGTTAGATCT |
| NO: 2243 | acyl-CoA synthetase bubblegum family member 1 | CCAGGTCAGGGCACA |
| | (ACSBG1), transcript variant 1, mRNA | GCACTGGCTCTACAT |
| | | TTACCAGGTCTTACG |
| SEQ ID | GI 1084352529 NM_000755 Homo sapiens | CTCAGCTTGGTTCCT |
| NO: 2244 | carnitine O-acetyltransferase | GCCCCCGCCCTGCTG |
| | (CRAT), transcript variant 1, mRNA | TATGATATTAATGTG |
| | | GAAGGTCATCAATAA |
| SEQ ID | GI 544709854 NM_001039845 Homo sapiens | TCCATCAGCCATACC |
| NO: 2245 | malate dehydrogenase 1B | TAAGACCTGCACCTA |
| | (MDH1B), transcript variant 1, mRNA | AGTGGCCATGTTTGC |
| | | TCAAATGTCCTCATC |
| SEQ ID | GI 594140701 NM_002661 Homo sapiens | CGAAATGCTGGGCTT |
| NO: 2246 | phospholipase C gamma 2 | AGTATGCATGTACTG |
| | (PLCG2), mRNA | CTGAAAAGCAGGGCA |
| | | GAACAAATCAGGCTC |
| SEQ ID | GI 1036031503 AHO11685 Homo sapiens | TTGCATTTCTGGACT |
| NO: 2247 | chromosome 1 AMPK beta-2 subunit | GAACCAGTCTTACCT |
| | (PRKAB2) gene, complete cds | GAGACTGGAAGGCTG |
| | | ATTTGCTTTGAGGCT |
| SEQ ID | GI 21914605 AY130302 Homo sapiens | ACGAGGCTCTGAGGG |
| NO: 2248 | truncated recombination activating gene 1 | AGCTGATGGATCTTT |
| | (RAG1) gene, complete cds | ACCTGAAGATGAAAC |
| | | CAGTATGGCGATCAT |
| SEQ ID | GI 389565477 NG_032771 Homo sapiens | GAGCATGGTTCAGCT |
| NO: 2249 | bone morphogenetic protein 7 | CAGAGCTGTCCTTAT |
| | (BMP7), RefSeqGene on chromosome 20 | TGAATCGTTGCCACA |
| | | GCTAAGAGGTCACTG |
| SEQ ID | GI 341865607 NG_029555 Homo sapiens | CAGAACCCTCTAACC |
| NO: 2250 | ETS proto-oncogene 1, transcription factor | TTGGGCAGCTCCTTA |
| | (ETS1), RefSeqGene on chromosome 11 | CCTCTTCCTGTCTGA |
| | | GCCATGTTTGATTTG |
| SEQ ID | GI 537544658 NG_033791 Homo sapiens | TCAGTCCTGCTCCTT |
| NO: 2251 | gremlin 1, DAN family BMP antagonist | CTGCAAGCCCAAGAA |
| | (GREM1), RefSeqGene on chromosome 15 | ATTCACTACCATGAT |
| | | GGTCACACTCAACTG |
| SEQ ID | GI 340007392 NG_029438 Homo sapiens | CCTGGGAACACTGAC |
| NO: 2252 | mitogen-activated protein kinase kinase 7 | CATATCTAGTCTCCC |
| | (MAP2K7), RefSeqGene on chromosome 19 | GGCTTTTTCCCCAAG |
| | | ATCCTGGTCTCTAAA |
| SEQ ID | GI 194018566 NG_008183 Homo sapiens | TCCTTCTACCTCCCC |
| NO: 2253 | pancreatic and duodenal homeobox 1 | TTCTCATCCCTCCTC |
| | (PDX1), RefSeqGene on chromosome 13 | TTCCTCTTCTCTAGC |
| | | TGCACACTTCACTAC |
| SEQ ID | GI 328751683 NG_028290 Homo sapiens | ATGAAGATACTGTGT |
| NO: 2254 | acyl-CoA synthetase long | GGCCCAAACGAATAC |
| | chain family member 6 | CAGTTTCCTTTAGCC |
| | (ACSL6), RefSeqGene on chromosome 5 | CCAGAGGCTGACAAG |
| SEQ ID | GI 237874281 NG_012193 Homo sapiens | TTCTTCATGGTGCCC |
| NO: 2255 | cytochrome c oxidase subunit 6B1 | CCAAAAGAATTGCCA |
| | (COX6B1), RefSeqGene on chromosome 19 | CACAATAACAGCCCA |
| | | GAATATCCCCAACAG |
| SEQ ID | GI 341823644 NG_029509 Homo sapiens | TGATCATGCCTGGGT |
| NO: 2256 | prostaglandin E receptor 3 | GGCTGTGCTCAAGAC |
| | (PTGER3), RefSeqGene on chromosome 1 | TTTCACTTTAAGGTC |
| | | TGAACCAGTAAGTGG |
| SEQ ID | GI 254826724 NG_012488 Homo sapiens | GAGAGAAACAGATGA |
| NO: 2257 | prostaglandin E synthase 2 | CCAGGAACCGCCTTG |
| | (PTGES2), RefSeqGene on chromosome 9 | GTTCACATAACTGAC |
| | | AAGTTCAGGGAACGG |
| SEQ ID | GI 237858776 NG_012127 Homo sapiens | GACCCAGCTTTAGAG |
| NO: 2258 | solute carrier family 2 member 4 | TCCAGGGAGAGCTGA |
| | (SLC2A4), RefSeqGene on chromosome 17 | CCGTCATAAGAACTG |
| | | AGAGGCCATAACATT |
| SEQ ID | GI 38016940 NM_014365 Homo sapiens | TGTCAGTTTATGATC |
| NO: 2259 | heat shock protein family B | TGACCTAGGTCCCCC |
| | (small) member 8 | CTTTCTTCTGTCCCC |
| | (HSPB8), mRNA | TGTGTTTAAGTCGGG |
| SEQ ID | GI 1019399995 LT222231 Homo sapiens | GTGGCTCAGGTGTTT |
| NO: 2260 | IncRNAfor PRTN3 gene | CTGAACAACTACGAC |
| | | GCGGAGAACAAACTG |
| | | AACGACATTCTCCTC |
| SEQ ID | GI 39725959 NM_175852 Homo sapiens | GTACAGATGAAGTCA |
| NO: 2261 | taxilin alpha | GTGGCTTGTCTGTGA |
| | (TXLNA), mRNA | GCTGAAGAGTCTTGA |
| | | GAGGGGCTGTCATCT |
| SEQ ID | GI 14278706 AF378903 Homo sapiens | AGCTTCTGGAATTGT |
| NO: 2262 | protein C | TGCTGTTGTGCCCTT |
| | (PROC) gene, complete cds | TCCATTCTTTTGTTA |
| | | TGATGCAGCTCCCCT |
| SEQ ID | GI 56157779 AY35b29 Homo sapiens | GCTTGCATAGTTCCT |
| NO: 2263 | superoxide dismutase 1, soluble | TCTTTTAAGCGCCTG |
| | (amyotrophic lateral sclerosis 1 | ACTTCGTTTTGTTTG |
| | (adult)) | GTGCCCGTTGTACCT |
| | (SUD1) gene, complete | |
| SEQ ID | GI 19909347 AF495471 Homo sapiens | GGTGCAAGTGGACCT |
| NO: 2264 | thrombomodulin | GTGTAGGACGTCCAG |
| | (THBD) gene, complete cds | TGAAACATTGTGTTG |
| | | GTGAATCAGCTAGAA |
| SEQ ID | GI 326806980 NG_028248 Homo sapiens | CTACATCACAGAACT |
| NO: 2265 | aryl hydrocarbon receptor | GTCAGATATGGTACC |
| | nuclear translocator | CACCTGTAGTGCCCT |
| | (ARNT), RefSeqGene on chromosome 1 | GGCTCGAAAACCAGA |
| SEQ ID | GI 345478675 NG_029883 Homo sapiens | TCGTTGTCATCTGGT |
| NO: 2266 | death associated protein kinase 1 | AGAGTCATGCCCATC |
| | (DAPK1), RefSeqGene on chromosome 9 | ACGTAACAGCTGCCA |
| | | ATGCATATTTCTGCA |
| SEQ ID | GI 306922359 NG_027701 Homo sapiens | TGCTTAGAGAGGTTA |
| NO: 2267 | retinoic acid receptor alpha | AGTGACTTGCGTAAG |
| | (RARA), RefSeqGene on chromosome 17 | GTCACCCAGAGTGGC |
| | | AGAGCTGAGATTTGA |
| SEQ ID | GI 594591639 NG_034041 Homo sapiens | GCCAGCAGTGGTCTT |
| NO: 2268 | sorbin and SH3 domain containing 1 | TATGCTGGCTAGTTT |
| | (SORBS1), RefSeqGene on chromosome 10 | TGAGAATGACAGTCT |
| | | GGAGACTGATCCAGC |
| SEQ ID | GI 189491779 NM_006507 Homo sapiens | TGAGACCTGGGTTGA |
| NO: 2269 | regenerating family member 1 beta | TGCAGATCTCTATTG |
| | (REGIB), mRNA | CCAGAACATGAATTC |
| | | AGGCAACCTGGTGTC |
| SEQ ID | GI 343790959 NG_029764 Homo sapiens | GGTGGGAAACTAGGG |
| NO: 2270 | AKT serine/threonine kinase 3 | AGTTGCTGGTATAAA |
| | (AKT3), RefSeqGene on chromosome 1 | GCCTGGAGTCCAAAT |
| | | GTCAGAGAGCCTAGA |
| SEQ ID | GI 212549700 NG_008949 Homo sapiens | ATTAGCTGGCATAGC |
| NO: 2271 | apolipoprotein C3 | AGAGGTGTTCATAAA |
| | (APOC3), RefSeqGene on chromosome 11 | CATTCTTAGTCCCCA |
| | | GAACCGGCTTTGGGG |
| SEQ ID | GI 298104098 NG_021428 Homo sapiens | CACTCATGCCCACCC |
| NO: 2272 | C-C motif chemokine receptor 2 | AGGGTAAGTCTAATC |
| | (CCR2), RefSeqGene on chromosome 3 | ATGTTCACCAATCAG |
| | | AACCTCTGCCACATC |
| SEQ ID | GI 237820700 NG_012083 Homo sapiens | TTTGCAATCAGGTGA |
| NO: 2273 | intercellular adhesion molecule 1 | GACCTCCTCTGATGG |
| | (ICAM1), RefSeqGene on chromosome 19 | GGAAAATGACACGGT |
| | | GAGTGACAAAGGATG |
| SEQ ID | GI 570700862 NG_033874 Homo sapiens | AAGGAGAAACGCTAC |
| NO: 2274 | nuclear factor kappa B subunit 2 | TGACCAGAGAGAGGT |
| | (NFKB2), RefSeqGene on chromosome 10 | CCAGTCATGTACTCC |
| | | GTGCTTGGTGAATTT |
| SEQ ID | GI 291219867 NG_016781 Homo sapiens | GCAATCCCACTAGGA |
| NO: 2275 | pyruvate dehydrogenase alpha 1 | CACAACACAATGGGT |
| | (PDHA1), RefSeqGene on chromosome X | TCCTGAGCCCTTTGA |
| | | TCCTCTGAATAGAGC |
| SEQ ID | GI 654825134 NG_008781 Homo sapiens | CAGGAGCTGAGGATA |
| NO: 2276 | poliovirus receptor | AAGGGCCCGATCTTT |
| | (PVR), RefSeqGene on chromosome 19 | CTTTGGGCAAGGTTA |
| | | AGCCTTTACTGCATA |
| SEQ ID | GI 1027250682 NG_047124 Homo sapiens | AAGGCAAAAAGACAC |
| NO: 2277 | solute carrier family 27 member 5 | CATAGGTTACCCAGC |
| | (SLC27A5), RefSeqGene on chromosome 19 | ACCCTGTGTTCTCAC |
| | | TTTTGAGAAGGGACA |
| SEQ ID | GI 387849236 NM_002613 Homo sapiens | CAGGCTTCCTCCTCC |
| NO: 2278 | 3-phosphoinositide dependent | TCATCAGCTATTTTA |
| | protein kinase 1 | CCCATCTCAGAACGT |
| | (PDPK1), transcript variant 1, mRNA | CCTGTGTCTCCATGT |
| SEQ ID | GI 1212624021 NM_017523 Homo sapiens | AGGTTCCAGTTTTGT |
| NO: 2279 | XIAP associated factor 1 | CTGAAAATTCTGATT |
| | (XAF1), transcript variant 1, mRNA | AAGCCTCTGGGCCCT |
| | | ACAGCCTGGAGAACC |
| SEQ ID | GI 1657840 U73304 Human CB1 | ATACTTTGCATTGTC |
| NO: 2280 | cannabinoid receptor | TGTCTGCACACCTTG |
| | (CNR1) gene, complete cds | AATCTGCCTGCTGGC |
| | | TCCCTTACTTTACCT |
| SEQ ID | GI 14423570 AF387519 Homo sapiens | GAGCACATAGAAAAA |
| NO: 2281 | interleukin 22 | ATTCCCAGCAAGCCT |
| | (IL22) gene, complete cds | TTGTCTTTTCCTGGC |
| | | AGTCAGCCCCTCTTT |
| SEQ ID | GI 32891808 AY341028 Homo sapiens | AGCATAGGCCCCCAT |
| NO: 2282 | microsomal glutathione S-transferase 2 | AATGGGATCTGTGCC |
| | (MGST2) gene, complete cds | CTTATAAGAAGTGAC |
| | | CAGGAAGCTTACTCT |
| SEQ ID | GI 1154067877 NG_052975 Homo sapiens | TGAAGAAGGAGGCTG |
| NO: 2283 | C-X-C motif chemokine receptor 2 | ACTGGGAAATGTCAA |
| | (CXCR2), RefSeqGene on chromosome 2 | ATCTGGGCTCCCCTC |
| | | TCTACATCCTTTGTA |
| SEQ ID | GI 1025608661 NG_047049 Homo sapiens | GGCCTGGAGTTTAGA |
| NO: 2284 | fatty acid binding protein 3 | ATCAGGGCTCTTTCC |
| | (FABP3), RefSeqGene on chromosome 1 | AAAGACACTGCATCT |
| | | GAAGATGTCAGAGGC |
| SEQ ID | GI 214010161 NG_009030 Homo sapiens | GAGTCCAGGACTGAG |
| NO: 2285 | GLI family zinc finger 2 | GTTCGGAAATCCTGG |
| | (GLI2), RefSeqGene on chromosome 2 | GTTTTTTCACCCCAT |
| | | TACTGGATGACTTGG |
| SEQ ID | GI 323668281 NG_023034 Homo sapiens | TTCCCAAGAAACTGT |
| NO: 2286 | vascular cell adhesion molecule 1 | GCTTGGCCGGCTGCT |
| | (VCAM1), RefSeqGene on chromosome 1 | TTCAATTATGCTGGT |
| | | TGTATGTGCATAGTT |
| SEQ ID | GI 7407497 AF243044 Homo sapiens | GGCATGAGATGCCCT |
| NO: 2287 | ECSIT | TTGAGTGTACAGCAA |
| | (ECSIT) mRNA, complete cds | ATCAATGTTTTCCTG |
| | | CTTGGGGCTCTCTTC |
| SEQ ID | GI 20530138 AF261937 Homo sapiens | AGGCTGCTCACTTAG |
| NO: 2288 | NFKBIE protein | GAAACCATATGCCAG |
| | (NFKBIE) gene, complete cds | ACACTGAGCTAGAAA |
| | | CTGAGGAGACAGACC |
| SEQ ID | GI 237649059 NG_012020 Homo sapiens | GAGGGAAATTAAGGT |
| NO: 2289 | adrenoceptor alpha 2A | GAAATGGCTCCCACA |
| | (ADRA2A), RefSeqGene on chromosome 10 | GGGATCTTGGCTTAA |
| | | AGAGCTAACCCCACA |
| SEQ ID | GI 577019604 NG_033916 Homo sapiens | CCCTGGCAAGGAAAT |
| NO: 2290 | growth differentiation factor 2 | GAGAAAGTATCCTAA |
| | (GDF2), RefSeqGene on chromosome 10 | TTAGGGGGCAATAAC |
| | | CCCCTGGAGAAGCAC |
| SEQ ID | GI 341823675 NG_029547 Homo sapiens | GTGTAGGATGATCTC |
| NO: 2291 | interleukin 5 receptor subunit alpha | AGGTGACAGACAGCA |
| | (IL5RA), RefSeqGene on chromosome 3 | GCAATTTATCACACC |
| | | CAGAAACGCATCCCC |
| SEQ ID | GI 237858721 NG_012100 Homo sapiens | GCTGCAAGGGGTGAG |
| NO: 2292 | matrix metallopeptidase 3 | GACACCAGCATGAAC |
| | (MMP3), RefSeqGene on chromosome 11 | CTTGTTCAGGTAATT |
| | | AACACTAACTGACCT |
| SEQ ID | GI 608785172 KJ534783 Homo sapiens | TCCTTAAGGAGGAAA |
| NO: 2293 | clone BZRAPl_iso-A_adult-A09 | ACCAGATGCTGAGGA |
| | benzodiazapine receptor peripheral- | AGAGCAGCTTCCCTG |
| | associated protein l isofo [symbol] | AGACAGAAGAGAAGG |
| SEQ ID | GI 153082751 NM_002199 Homo sapiens | CTTCTCTTTAACTCA |
| NO: 2294 | interferon regulatory factor 2 | GGACTCCAGCCCATT |
| | (IRF2), mRNA | GGTAGACGTGTGTTT |
| | | CTAGAGCCTGCTGGA |
| SEQ ID | GI 187423911 NM_003764 Homo sapiens | TTTTTCTACTAGCTA |
| NO: 2295 | syntaxin 11 | CTGAGGCTGCCACAT |
| | (STX11), mRNA | CTGGATGGAACTGAG |
| | | TGGAGGGGGAAAAGA |
| SEQ ID | GI 48772828 AY618665 Homo sapiens | CTTCATCTGTCCTGA |
| NO: 2296 | VIMP mRNA, complete cds | AACGGAAATCGGACA |
| | | GAAAGCCTTTGCGGG |
| | | GAGGAGGTTATAACC |
| SEQ ID | GI 170014713 NG_007461 Homo sapiens | TCTAGAAGCCACTCA |
| NO: 2297 | transforming growth factor beta receptor 1 | AATTCTTTGGCTCGT |
| | (TGFBR1), RefSeqGene on chromosome 9 | GGTTCCCTCCTCCAT |
| | | CATCAAAACCAGCAG |
| SEQ ID | GI 224809355 NG_011515 Homo sapiens | GACCCAGTGAAGTTT |
| NO: 2298 | uncoupling protein 3 | AAGGGCAGGACACCT |
| | (UCP3), RefSeqGene on chromosome 11 | CTTAAGTTGGGGCTC |
| | | TTCACTCACTTGTTG |
| SEQ ID | GI 193211454 NM_020651 Homo sapiens | GGTCCCAGATCCCAC |
| NO: 2299 | pel lino E3 ubiquitin protein ligase 1 | TTCCTCATGGTACTC |
| | (PELIl), mRNA | ATACTTTTCATGCAG |
| | | CCTGTCCCTTTTGTG |
| SEQ ID | GI 21634442 AF274025 Homo sapiens | TATCAGACTGTTCCC |
| NO: 2300 | GTP-binding protein Rab25 | TGTTCACAGCACCCT |
| | mRNA, complete cds | CAGGGTCTTAAGGTC |
| | | TTCATGCCCTATCAC |
| SEQ ID | GI 1036032362 AH002667 Homo sapiens | GTTTCAAGGCTTAGT |
| NO: 2301 | cytochrome P450 | GTGTGTTGTGGTGTG |
| | (CYP1A2) gene, complete cds | CGTCAGTAGCTCTTG |
| | | GTGCTTAGTCTGGAA |
| SEQ ID | GI 50234986 AY675319 Homo sapiens | ATGCAGTCTAGGTAC |
| NO: 2302 | transforming growth factor, beta receptor II | CACAAGTAGTGTTCT |
| | (70/80 kDa) | CTTGTGCAAGCACAG |
| | (TGFBR2) gene, complete cds | CTTCCAGCTGTGTTG |
| SEQ ID | GI 353703739 NG_030372 Homo sapiens | CTATTTGAAGACAGA |
| NO: 2303 | CD83 molecule | CACAGGGATTGGAGT |
| | (CD83), RefSeqGene on chromosome 6 | GATGTGTCTACAAGC |
| | | CAAGCAACGCCGAGG |
| SEQ ID | GI 212549732 NG_008981 Homo sapiens | ACTTGAGAGGCAGAC |
| NO: 2304 | growth differentiation factor 6 | ATACAGAGCAAGACA |
| | (GDF6), RefSeqGene on chromosome 8 | CAGGGCAGGCCAAAA |
| | | AAGACCACTTACATC |
| SEQ ID | GI 237858686 NG_012087 Homo sapiens | TATATCCAAGAAAGA |
| NO: 2305 | interleukin 6 receptor | AACCTGCTGCTCCCC |
| | (IL6R), RefSeqGene on chromosome 1 | TCTCTGCTGAGGGAA |
| | | GAGCAAGAGGAACTT |
| SEQ ID | GI 240255451 NG_012330 Homo sapiens | GGCCTTGGGCAAGTT |
| NO: 2306 | MYB proto-oncogene, transcription factor | ACCTCCATTTTCTGT |
| | (MYB), RefSeqGene on chromosome 6 | CTCCATTCTCGAGCC |
| | | TGTCTAGAGAGAGAA |
| SEQ ID | GI 4826562 Y17151 Homo sapiens | ACTGGGGTGAAGTTT |
| NO: 2307 | mRNA for multidrug resistance protein 3 | CGTACTGGGATCATG |
| | (ABCC3) | GGTGTCATCTACAGG |
| | | AAGGCTCTGGTTATC |
| SEQ ID | GI 574584717 NM_001289177 Homo sapiens | TAGCTACCTCCCACT |
| NO: 2308 | acyl-CoA synthetase | CAGCCATATTGCAGC |
| | bubblegum family member 2 | ACAGATGATGGACAT |
| | (ACSBG2), transcript variant 1, mRNA | CTGGGTACCCATAAA |
| SEQ ID | GI 874507471 NM_005928 Homo sapiens | CTGTCCAGTTTGTGG |
| NO: 2309 | milkfat globule-EGF factor 8 protein | CATCCTACAAGGTTG |
| | (MFGE8), transcript variant 1, mRNA | CCTACAGTAATGACA |
| | | GTGCGAACTGGACTG |
| SEQ ID | GI 110735399 NM_001031680 Homo sapiens | CACTCTGCATACGCT |
| NO: 2310 | runt related transcription factor 3 | TCTGTTGAGAATTTG |
| | (RUNX3), transcript variant 1, mRNA | TGGCTAGACATTCCT |
| | | GTGGGACCGGGAATC |
| SEQ ID | GI 356460958 NG_030484 Homo sapiens | GCATTTTATATTTTC |
| NO: 2311 | adenosine kinase | CTAGGCTGAGGCTTC |
| | (ADK), RefSeqGene on chromosome 10 | CCAGGCTGTTGCTTT |
| | | TTTTCCCCCCACCTT |
| SEQ ID | GI 260763953 NG_013056 Homo sapiens | TTGCCAAGAGTCACA |
| NO: 2312 | chitinase 3 like 1 | CAGCAAGTTAACAGT |
| | (CHI3L1), RefSeqGene on chromosome 1 | GGATCTCCCAATTCC |
| | | CTGCCAATGCTCTAT |
| SEQ ID | GI 343403846 NG_029699 Homo sapiens | CAACTATAACTCCAG |
| NO: 2313 | protein kinase cAMP-activated | TGATGACTTGCATAC |
| | catalytic subunit alpha | AAGGCGTGGGCTCAG |
| | (PRKACA), RefSeqGene on chromoso [symbol] | AGGGTTTGGGGAAAA |
| SEQ ID | GI 300116282 NG_023271 Homo sapiens | CTGTTTCTGTTCTCT |
| NO: 2314 | regenerating family member 1 alpha | CCTGCTTAGCTCCAG |
| | (REGIA), RefSeqGene on chromosome 2 | GGATGGAACTGGGAC |
| | | TGGGATAGAGGAAAG |
| SEQ ID | GI 194294528 NG_008241 Homo sapiens | AGGAGCTGCAAGGAG |
| NO: 2315 | succinate-CoA ligase | AATGTTGTGGTTAGA |
| | ADP-forming beta subunit | TTGGAGTGAGGAAGG |
| | (SUCLA2), RefSeqGene on chromosome 13 | GGTAGGGTACTGAAA |
| SEQ ID | GI 164690417 AK312618 Homo sapiens | ACAGCTGGTCAAGAA |
| NO: 2316 | cDNA, FLI93000, Homo sapiens | CGATACCATAGCCTA |
| | RAB5A, member RAS oncogene family | GCACCAATGTACTAC |
| | (RAB5A), mRNA | AGAGGAGCACAAGCA |
| SEQ ID | GI 263191773 NG_015830 Homo sapiens | CCTCCCCAATTTTTG |
| NO: 2317 | insulin receptor substrate 1 | CAAAGTAGGAACTGG |
| | (IRS1), RefSeqGene on chromosome 2 | AGTTTTCTCGTTGCT |
| | | CCAAAGCTGTGAGGC |
| SEQ ID | GI 1039673930 NG_050913 Homo sapiens | CTGTACACCATCTCG |
| NO: 2318 | nuclear receptor subfamily 5 group A member 2 | TAATCGCGAAAGTTA |
| | (NR5A2), RefSeqGene on chromosome 1 | TCACCATGTTGGAAA |
| | | AGCCCACGCCCTTCT |
| SEQ ID | GI 211904121 NG_008930 Homo sapiens | AAGAAGCTGTGAGTG |
| NO: 2319 | cytochrome p450 oxidoreductase | CAGGTGTTAGAGACA |
| | (POR), RefSeqGene on chromosome 7 | GGCAGCATGAAGAGG |
| | | AGGGAATAGAGTCAG |
| SEQ ID | GI 1147592400 NG_029037 Homo sapiens | TTGAAAAATGTCAAC |
| NO: 2320 | reticulon 4 | TTGGGATGTGTCTTG |
| | (RTN4), RefSeqGene on chromosome 2 | GAGGAGGGACTGACA |
| | | AGGCCTGCTGATCTC |
| SEQ ID | GI 172072641 NM_005373 Homo sapiens | AGGACCCTTTCTCCA |
| NO: 2321 | MPL proto-oncogene, thrombopoietin receptor | CAGGCAGGCTCATTT |
| | (MPL), mRNA | CACTAAGCTCCTCCT |
| | | TTACTTTCTCTCTCC |
| SEQ ID | GI 156616272 NM_002664 Homo sapiens | AGAGGGGCTGTTAGC |
| NO: 2322 | pleckstrin | ATTGCGCAGCATCTT |
| | (PLEK), mRNA | CAGTTCTCCAGTAAA |
| | | TGATATTGCGTTCGT |
| SEQ ID | GI 269914182 NM_178859 Homo sapiens | AAGTGACAGCTGTTA |
| NO: 2323 | solute carrier family 51 beta subunit | CTGCCTGGGAGAGCT |
| | (SLC51B), mRNA | CAAGTGCAAAGACTA |
| | | TCCTGTTCTCCCATA |
| SEQ ID | GI 315434201 NM_020429 Homo sapiens | ATGCGACCGAAAGAC |
| NO: 2324 | SMAD specific E3 ubiquitin protein ligase 1 | TTGAAAAAACGGCTG |
| | (SMURF1), transcript variant 1, mRNA | ATGGTGAAATTCCGT |
| | | GGGGAAGAAGGTTTG |
| SEQ ID | GI 60391402 AB019488 Homo sapiens | CTGGAGACCCGGTGG |
| NO: 2325 | NTRK1 gene for TRKA, complete cds | AGAAGAAGGACGAAA |
| | | CACCTTTTGGGGTGA |
| | | GATAGGAAGTAGAAG |
| SEQ ID | GI 301500676 NG_023437 Homo sapiens | GTGATTCTCAGCTGA |
| NO: 2326 | apolipoprotein L4 | AATAGATTGGTTCCT |
| | (APOL4), RefSeqGene on chromosome 22 | CCACAAAGCATCGTG |
| | | GCACTTCCCTGGTGA |
| SEQ ID | GI 237858602 NG_012146 Homo sapiens | GAGAATGGAGTCTGA |
| NO: 2327 | period circadian clock 2 | GGTGAGCACTTTACT |
| | (PER2), RefSeqGene on chromosome 2 | GGGAATTGCAGTCCC |
| | | AGGGTAGCAGTAGAA |
| SEQ ID | GI 597709817 NM_032965 Homo sapiens | AGCATTCTGACCTCT |
| NO: 2328 | C-C motif chemokine ligand 15 | GCCCTGGGACTTCCT |
| | (CCL15), mRNA | GGATCCTCCTCTTCT |
| | | TATAAATACAAGGGC |
| SEQ ID | GI 1041817991 NM_000569 Homo sapiens | CATCATCCTCAGGCC |
| NO: 2329 | Fc fragment of IgG receptor Illa | TCTCTACAAGCAGCA |
| | (FCGR3A), transcript variant 1, mRNA | GGAAACATAGAACTC |
| | | AGAGCCAGATCCCTT |
| SEQ ID | GI 156105692 NM_001037335 Homo sapiens | GCGGCCCACATCATG |
| NO: 2330 | helicase with zinc finger 2 | GTGAAGGAGTACATG |
| | (HELZ2), transcript variant 1, mRNA | ATTCAGTTTAATAGG |
| | | CTCGTGGCTGAGTTC |
| SEQ ID | GI 30526191 AY275469 Homo sapiens | GACACCATCTTCCAC |
| NO: 2331 | chemokine C motif receptor 1 | AAGGTGCTTTCTTCG |
| | (XCR1) gene, complete cds | GGCTGTGATTATTCC |
| | | GAACTCACGTGGTAC |
| SEQ ID | GI 308210781 NG_027799 Homo sapiens | ACCTTAGCCACTCCA |
| NO: 2332 | interferon related developmental regulator 1 | CAGCCACTTTCAGGG |
| | (IFRD1), RefSeqGene on chromosome 7 | ATCAGTGTGGAGAAA |
| | | GATTCATAGTCAGGT |
| SEQ ID | GI 300116221 NG_023260 Homo sapiens | AGAAGCTCATAACAG |
| NO: 2333 | oxoglutarate dehydrogenase | TGGTGAACATTGGAG |
| | (OGDH), RefSeqGene on chromosome 7 | AGGGCAGCTGAGACC |
| | | TCAACCTTGCAAAAT |
| SEQ ID | GI 114155149 NM_020311 Homo sapiens | CATTCTCTCTTTCTC |
| NO: 2334 | atypical chemokine receptor 3 | TTGATGACGCAGCTG |
| | (ACKR3), mRNA | TCATTTGGCTGTGCG |
| | | TGCTGACAGTTTTGC |
| SEQ ID | GI 261337164 NM_206943 Homo sapiens | TCTGCGCAAATGGTG |
| NO: 2335 | latent transforming growth | ATTGTTCCAACCTTG |
| | factor beta binding protein 1 | AAGGCTCCTACATGT |
| | (LTBP1), transcript variant 1, mRN [symbol] | GTTCATGCCACAAAG |
| SEQ ID | GI 163644319 NM_032873 Homo sapiens | CCCCATACACCAGTG |
| NO: 2336 | ubiquitin associated and SH3 | TTGCTGGCTGAAGAT |
| | domain containing B | ACCCGCTTAAGGATG |
| | (UBASH3B), mRNA | CTAACATTTACCCTG |
| SEQ ID | GI 117606543 EF064746 Homo sapiens | AATCCATTCCTCCTG |
| NO: 2337 | complement component | TTAGGCCTCTGCCTA |
| | (3d/Epstein Barr virus) receptor 2 | AAATACTTGTACCCA |
| | (CR2) gene, complete cds | GCAATTTGCCTGGCT |
| SEQ ID | GI 37953284 AY438977 Homo sapiens | CCAAGAAGCTGGACA |
| NO: 2338 | phospholipase A2, group IB | GCTGTAAATTTCTGC |
| | (pancreas) | TGGACAACCCGTACA |
| | (PLA2G1B) gene, complete cds | CCCACACCTATTCAT |
| SEQ ID | GI 341865606 NG_029554 Homo sapiens | TAGACTAAACAAAAT |
| NO: 2339 | Fc fragment of IgE receptor II | CAGCAAATGGCCCCT |
| | (FCER2), RefSeqGene on chromosome 19 | GAGTGCCACCAAGTC |
| | | CCAGATGCTATCCTG |
| SEQ ID | GI 298919225 NG_023030 Homo sapiens | TTACATGCCACTGTT |
| NO: 2340 | heme oxygenase 1 | GGGGCTCAGAAAGTG |
| | (HMOX1), RefSeqGene on chromosome 22 | ATACCAGGACAACTG |
| | | GTGCTTTGACATGAT |
| SEQ ID | GI 1024336778 NG_046901 Homo sapiens | CTTAGCTCAGTCTCA |
| NO: 2341 | NLR family pyrin domain containing 9 | TTAGGCAGAACTGAG |
| | (NLRP9), RefSeqGene on chromosome 19 | CCACATCTCCCCACA |
| | | GATCCAACACAGACA |
| SEQ ID | GI 1154345445 NG_033859 Homo sapiens | GTCAGCATCCTCACC |
| NO: 2342 | sodium voltage-gated | ATCACCATGAAGGGT |
| | channel alpha subunit 11 | AAGTTCCACATCCCA |
| | (SCN11A), RefSeqGene on chromosome 3 | ATCCAAGGGAAAGTC |
| SEQ ID | GI 238776810 NG_012247 Homo sapiens | ATGGGGAAGTACTCT |
| NO: 2343 | solute carrier family 25 member 13 | CTTCCCTTGGGGTGG |
| | (SLC25A13), RefSeqGene on chromosome 7 | CTGGGACTATGTGAC |
| | | TTTTGAGTAACAGTT |
| SEQ ID | GI 1032528811 NG_050748 Homo sapiens | CCATACCCTGCTCTA |
| NO: 2344 | solute carrier family 4 member 3 | TTCCAGAAACTCTCC |
| | (SLC4A3), RefSeqGene on chromosome 2 | AGCCTGCCAAGTTAG |
| | | GTTTTCCAAGGCAAA |
| SEQ ID | GI 345842418 NG_029946 Homo sapiens | GCAAGTAAGTTTTGC |
| NO: 2345 | SMAD family member 2 | TCCACAAATCCCCCA |
| | (SMAD2), RefSeqGene on chromosome 18 | ACTCAGCAGCACATG |
| | | TCTTTTGCTCTACCC |
| SEQ ID | GI 90577165 NM_032587 Homo sapiens | CATCCCATGTGCAAG |
| NO: 2346 | caspase recruitment domain family member 6 | AGCTCTCAGTTCAAA |
| | (CARD6), mRNA | TCCGATCAGTCCAAC |
| | | CCATCCACAGTCAAA |
| SEQ ID | GI 436408720 NM_014226 Homo sapiens | TGGAGTAAATGAACT |
| NO: 2347 | MOK protein kinase | GGACCAAATCTCAAA |
| | (MOK), transcript variant 1, mRNA | AATCCACGATGTCAT |
| | | CGGCACACCCGCTCA |
| SEQ ID | GI 219802033 NM_001143835 Homo sapiens | TACGACATTGGACGA |
| NO: 2348 | nuclear factor related to | AAGCTGTGGATCTAC |
| | kappaB binding protein | CTGCATCGTGACCGG |
| | (NFRKB), transcript variant 1, mRNA | AGTGAAGAAGAGTTT |
| SEQ ID | GI 227499618 NM_003645 Homo sapiens | GCTGGTGTCGCCAGA |
| NO: 2349 | solute carrier family 27 member 2 | ACTACAAGCAGCTGT |
| | (SLC27A2), transcript variant 1, mRNA | CGAAGAGATACTGCC |
| | | AAGCCTTAAAAAAGA |
| SEQ ID | GI 166158920 NM_013996 Homo sapiens | ATGGGCAAACGGGAT |
| NO: 2350 | tachykinin precursor 1 | GCTGATTCCTCAATT |
| | (TAC1), transcript variant alpha, mRNA | GAAAAACAAGTGGCC |
| | | CTGTTAAAGGCTCTT |
| SEQ ID | GI 259013227 NG_012923 Homo sapiens | GCGTACCCTTGAGAC |
| NO: 2351 | glycogen synthase 1 | AAGGGGTCTTTGGAA |
| | (GYS1), RefSeqGene on chromosome 19 | ACTATGTCCAGGACC |
| | | TGGGAACATGAAAAC |
| SEQ ID | GI 221136810 NM_006931 Homo sapiens | TGGGTTCTGATATTG |
| NO: 2352 | solute carrier family 2 member 3 | CCGCACTAGGGGATA |
| | (SLC2A3), mRNA | TAGGAGAGGAAAAGT |
| | | AAGGTGCAGTTCCCC |
| SEQ ID | GI 39725959 NM_175852 Homo sapiens | TGATGAAGCAGCAAG |
| NO: 2353 | taxilin alpha | AGACCCACCTGAAGC |
| | (TXLNA), mRNA | AACAGCTTGCCCTAT |
| | | ACACAGAGAAGTTTG |
| SEQ ID | GI 197245401 NG_008401 Homo sapiens | GGAACTTTCTTCACC |
| NO: 2354 | glial fibrillary acidic protein | ACTTTCCCCTCCCTT |
| | (GFAP), RefSeqGene on chromosome 17 | TTCCATCTTCCTTCA |
| | | GATAGACATGCGCCC |
| SEQ ID | GI 1050193335 NG_027721 Homo sapiens | CCATAACTTGGATAG |
| NO: 2355 | transforming growth factor beta 2 | TTGCTGAGCCAGCCA |
| | (TGFB2), RefSeqGene on chromosome 1 | GATATAACAAGAGCC |
| | | ACGTGCTTTCTGGGG |
| SEQ ID | GI 518828582 NM_001278579 Homo sapiens | AAATGTTGCTCTGGG |
| NO: 2356 | activin A receptor type 2A | AGACTTACTGCATTG |
| | (ACVR2A), transcript variant 1, mRNA | CCGACAGCACAGATG |
| | | TGAAGGACATGAGAC |
| SEQ ID | GI 167614492 NM_016583 Homo sapiens | ATGAGGTTCTCAGAG |
| NO: 2357 | BPI fold containing family A member 1 | GCTTGGACATCACCC |
| | (BPIFA1), transcript variant 1, mRNA | TGGTGCATGACATTG |
| | | TTAACATGCTGATCC |
| SEQ ID | GI 345110626 NM_002001 Homo sapiens | AGTTGAAGACAGTGG |
| NO: 2358 | Fc fragment of IgE receptor la | AACCTACTACTGTAC |
| | (FCERIA), mRNA | GGGCAAAGTGTGGCA |
| | | GCTGGACTATGAGTC |
| SEQ ID | GI 83026426 DQ301957 Homo sapiens | CAAACACATGACATA |
| NO: 2359 | dual specificity phosphatase 1 | AGGCAGGTGTGTGCT |
| | (DUSP1) gene, complete cds | ACCTGCCCCTAGAGA |
| | | AACTCTTGAGCAAGG |
| SEQ ID | GI 190358485 NG_008035 Homo sapiens | CATCATACTCAGATC |
| NO: 2360 | carnitine palmitoyltransferase 2 | CAGGGTCCACCCAAA |
| | (CPT2), RefSeqGene on chromosome 1 | TTTCTCTTCTCCTCC |
| | | TCACCACTGGCTACC |
| SEQ ID | GI 190358507 NG_008042 Homo sapiens | CATCCAGGACCTGGT |
| NO: 2361 | 2,4-dienoyl-CoA reductase 1 | TTAACTAGTCCTCAT |
| | (DECR1), RefSeqGene on chromosome 8 | TCTGGTCCTGTGATG |
| | | GAACTCTGCCTCCAG |
| SEQ ID | GI 260593660 NG_013020 Homo sapiens | AAGAAGTACCTCCCA |
| NO: 2362 | eosinophil peroxidase | GCTCCAGCTGCTTCA |
| | (EPX), RefSeqGene on chromosome 17 | TGTCTCTCCAGAACT |
| | | CTGTTTCCTGACAAA |
| SEQ ID | GI 429535870 NG_033021 Homo sapiens | GTAAGCACATTCTCC |
| NO: 2363 | interleukin 17A | CCTCCTTCTTCCTTG |
| | (IL17A), RefSeqGene on chromosome 6 | CCAGAAAGCAACAAC |
| | | AAGGAATCCTCCACT |
| SEQ ID | GI 225903414 NG_011740 Homo sapiens | CCACAACATGGTGCT |
| NO: 2364 | matrix metallopeptidase 1 | TCCCTCTTCAAAGAA |
| | (MMP1), RefSeqGene on chromosome 11 | GAATCCTAGAACTCC |
| | | CTCTGCAGCATGTGG |
| SEQ ID | GI 648216382 NG_029573 Homo sapiens | AGGAAGTCCCTGAAT |
| NO: 2365 | TNF receptor superfamily member 8 | TTCCTGAACCAAGTT |
| | (TNFRSF8), RefSeqGene on chromosome 1 | GGGACCTTGTGTCTT |
| | | GCTCAGCATCACTTT |
| SEQ ID | GI 197313788 NM_001423 Homo sapiens | GTTCTGGCAAGAGCA |
| NO: 2366 | epithelial membrane protein 1 | GATACTGTCTTTGTG |
| | (EMP1), mRNA | CTGAATACGCTAAGC |
| | | CTGGAAGCCATCCTG |
| SEQ ID | GI 157909838 NM_006252 Homo sapiens | ATAGCAGACAGCCCC |
| NO: 2367 | protein kinase AMP-activated | AAAGCAAGATGTCCA |
| | catalytic subunit alpha 2 | TTGGATGCACTGAAT |
| | (PRKAA2), mRNA | ACGACTAAGCCCAAA |
| SEQ ID | GI 68160936 NM_005082 Homo sapiens | CTGGAGAAAGCATCA |
| NO: 2368 | tripartite motif containing 25 | AAACTGCGAGGAATC |
| | (TRIM25), mRNA | TCAACAAAGCCAGTC |
| | | TACATCCCCGAGGTG |
| SEQ ID | GI 31164 X51956 Human ENO2 gene | TTCTAAGTTGGACGT |
| NO: 2369 | for neuron specific | CTCCGGCGTGCATTT |
| | (gamma) enolase | TATCCTAGAGCGTCC |
| | | CTTTTGGTTTGCATT |
| SEQ ID | GI 922304389 NG_042830 Homo sapiens | TCAGGGCTTTTGTGC |
| NO: 2370 | acyl-CoA dehydrogenase family member 11 | TGGCTCTTCTGTCTG |
| | (ACAD11), RefSeqGene on chromosome 3 | CTGGAATGTGCTCTG |
| | | TCTTAGTAATTGCAA |
| SEQ ID | GI 345478654 NG_029871 Homo sapiens | GGCTTCTGGCGATGC |
| NO: 2371 | activating transcription factor 3 | CATAGTGGCTTAAGG |
| | (ATF3), RefSeqGene on chromosome 1 | ATGTCAGAGCTGAGG |
| | | TTCCACCATTTTATT |
| SEQ ID | GI 834400736 NG_042182 Homo sapiens | AGTCTAAGGAGGGTG |
| NO: 2372 | eomesodermin | CTGCCTGACATGTTC |
| | (EOMES), RefSeqGene on chromosome 3 | ACTTAAGCCACTGCT |
| | | TTGGCTTTCTTTTCT |
| SEQ ID | GI 401782607 NG_032906 Homo sapiens | GGTGCATGTTAATAT |
| NO: 2373 | coagulation factor II thrombin receptor | GGACAGTGCTGGTGT |
| | (F2R), RefSeqGene on chromosome 5 | AGACAGAAAGGCAGG |
| | | TGGATGAACTTGGCT |
| SEQ ID | GI 1024846802 NG_046996 Homo sapiens | GTGCCAACAGTGTTG |
| NO: 2374 | mediator complex subunit 1 | ATCTTCCTGCCTGTT |
| | (MED1), RefSeqGene on chromosome 17 | TCTTCTTGAAATTTC |
| | | CCCAGCCAATCCCAG |
| SEQ ID | GI 332164677 NG_028910 Homo sapiens | TCTACTTGGACACAA |
| NO: 2375 | nuclear receptor subfamily 4 group A member 3 | ACTCCTGGGGCAGTA |
| | (NR4A3), RefSeqGene on chromosome 9 | GTTCTCAATTGGGCT |
| | | ACTCCACTTTGGAGT |
| SEQ ID | GI 117606489 EF064719 Homo sapiens | CAGGTCTTTGCACCC |
| NO: 2376 | interleukin 27 receptor, alpha | TGTGTTTCCTCTTCC |
| | (IL27RA) gene, complete cds | TGGAATGCTGTTCTT |
| | | CTAGCTACTGCATGG |
| SEQ ID | GI 662033938 NG_023295 Homo sapiens | TACCTGACCCTCTCT |
| NO: 2377 | acetyl-CoA carboxylase alpha | GGGAAGGATGGAGGA |
| | (ACACA), RefSeqGene on chromosome 17 | GAGTCTAAGAAGCCT |
| | | TGTGCAGTAAGTGAT |
| SEQ ID | GI 163954923 NG_007095 Homo sapiens | GCTCAGTAGTGTACA |
| NO: 2378 | aldehyde dehydrogenase 3 family member A2 | GCAAGGAAGGCACTC |
| | (ALDH3A2), RefSeqGene on chromosome 17 | TGGCTGAAACTCACT |
| | | AAGTGGGAGAATCCT |
| SEQ ID | GI 344313160 NG_029811 Homo sapiens | CAGTATCAACTTCAT |
| NO: 2379 | carbohydrate sulfotransferase 1 | AGAGCTGGCATGAGG |
| | (CHST1), RefSeqGene on chromosome 11 | GTGCGATGAGCTGAT |
| | | GGCTGTGAAAGAAGC |
| SEQ ID | GI 219521823 NG_009222 Homo sapiens | TGAATATCAAAGCCC |
| NO: 2380 | ELK1, ETS transcription factor | ATATCCACATGTTGC |
| | (ELK1), RefSeqGene on chromosome X | TAGAGGTGAGAGCAG |
| | | CTCACCCCACTACCA |
| SEQ ID | GI 312433967 NG_027936 Homo sapiens | AATTTAAGTCTGGAC |
| NO: 2381 | pannexin 1 | TTCCCAGTCTGTCAC |
| | (PANX1), RefSeqGene on chromosome 11 | CCCAGGATGTCCTTT |
| | | ATCTGACCCCAGCTT |
| SEQ ID | GI 289577082 NG_016598 Homo sapiens | AGGCCATTATCTTGC |
| NO: 2382 | phosphorylase kinase regulatory subunit beta | TCATACAAGGTCCTT |
| | (PHKB), RefSeqGene on chromosome 16 | TCCCTTTCTGCCTGG |
| | | TCCTAAGCTGTAGGA |
| SEQ ID | GI 915408 U30245 Human | ATAGACATCTCTACC |
| NO: 2383 | myelomonocytic specific protein | AAGATCTCCTGCTCC |
| | (MNDA) gene, 5′ flanking | TGCCACTCTGTGAAC |
| | sequence and complete exon 1 | AGGAAAGGAGGGAGA |
| SEQ ID | GI 189571639 NG_007991 Homo sapiens | GCCCTCGTGGTGAAG |
| NO: 2384 | acyl-CoA dehydrogenase, | GCAAAAGACCTTAAT |
| | C-2 to C-3 short chain | CCAGAGAAGCACGTT |
| | (ACADS), RefSeqGene on chromosome 12 | CATCCCTGAGAAATT |
| SEQ ID | GI 338221701 NG_029188 Homo sapiens | CTAGAAAACCTTACC |
| NO: 2385 | caspase 9 | CCAGTGGTGCTCAGA |
| | (CASP9), RefSeqGene on chromosome 1 | CCAGAGATTCGCAAA |
| | | CCAGAGGTTCTCAGA |
| SEQ ID | GI 329665040 NG_028340 Homo sapiens | GTAAGGATTGGCCTT |
| NO: 2386 | granzyme B | GGCCACTTCGAAAAG |
| | (GZMB), RefSeqGene on chromosome 14 | GGACTAGCTGTGGTT |
| | | CAGTGAAAGGCTAAT |
| SEQ ID | GI 1016841222 NG_008723 Homo sapiens | TTTCCGCTGCATCAC |
| NO: 2387 | monoamine oxidase B | AGGCTCCTCATTCTC |
| | (MAOB), RefSeqGene on chromosome X | CACATTGCAGATAAT |
| | | CACGTTTAGGACTGC |
| SEQ ID | GI 315360651 NG_028027 Homo sapiens | AAGACACTCGATACA |
| NO: 2388 | prodynorphin | TATTTAGGCCTCAGG |
| | (PDYN), RefSeqGene on chromosome 20 | ATGGTTTGTGGCGTG |
| | | GTCAGCAGACTGACT |
| SEQ ID | GI 45643118 NM_006117 Homo sapiens | GACAGGGCAACATTT |
| NO: 2389 | enoyl-CoA delta isomerase 2 | CATACACCATTTAGT |
| | (ECI2), transcript variant 1, mRNA | CACCTAGGCCAAAGT |
| | | CCGGAAGGATGCTCC |
| SEQ ID | GI 75677324 NM_014238 Homo sapiens | TGGAGTGAAGTGCAA |
| NO: 2390 | kinase suppressor of ras 1 | GCATTGCAGGTTGAA |
| | (KSR1), mRNA | GTGTCACAACAAATG |
| | | TACCAAAGAAGCCCC |
| SEQ ID | GI 29501801 AY260471 Homo sapiens | CTAACGATGTGACCT |
| NO: 2391 | BCL2-antagonist/killer 1 | CGGGCACTCAACTCT |
| | (BAK1) gene, complete cds | TTGTGCCTCACTTTT |
| | | CCTGCCTGTAAAGTG |
| SEQ ID | GI 1174251657 KY500414 Homo sapiens | TCTTTGCTGACTCTC |
| NO: 2392 | LTB gene, complete cds | TTTCCATGTTCCTGT |
| | | GATGTTGTGCTTGTG |
| | | TCCCGACATAAGCCC |
| SEQ ID | GI 37953284 AY438977 Homo sapiens | ACCGCAACTCTCTGA |
| NO: 2393 | phospholipase A2, group IB | ACCTGTCTCTTTATC |
| | (pancreas) | TGCAAGGTGCACGAC |
| | (PLA2G1B) gene, complete cds | TGATGGGACTATTCA |
| SEQ ID | GI 1049011036 AH002959 Homo sapiens | GTTCTCAGCACAGAT |
| NO: 2394 | RAF1 | ATTCTACACCTCACG |
| | (RAF1) gene, complete cds | CCTTCACCTTGAACA |
| | | CCTCCAGTCCCTCAT |
| SEQ ID | GI 533112518 NG_007159 Homo sapiens | TCTGTCAGTTAGCAC |
| NO: 2395 | chloride voltage-gated channel 5 | CCTGGTTCCACTGGT |
| | (CLCN5), RefSeqGene on chromosome X | CATGAAAGTGAGTTG |
| | | AGTCAGGAACTTCCA |
| SEQ ID | GI 270289740 NG_015895 Homo sapiens | TGAGACCAAGTTTGC |
| NO: 2396 | four and a half LIM domains 1 | CAAGCATTGCGTGAA |
| | (FHL1), RefSeqGene on chromosome X | GTGCAACAAGGTATG |
| | | CTTTCAAGGGAGTTC |
| SEQ ID | GI 298676536 NG_021477 Homo sapiens | CAGGTCACTTCCAGA |
| NO: 2397 | glutamate decarboxylase 1 | GCACTTCTGACCATT |
| | (GAD1), RefSeqGene on chromosome 2 | TGAAAAGGCCCTGCT |
| | | TTGTGAAATTTGGCA |
| SEQ ID | GI 226493744 NG_011821 Homo sapiens | GTAGAAGCTGCTTCC |
| NO: 2398 | nuclear receptor subfamily | ACTCAGAACCCTTGT |
| | 4 group A member 2 | CCTTGGGCAAATGAA |
| | (NR4A2), RefSeqGene on chromosome 2 | GTCCAACGAGTTTCA |
| SEQ ID | GI 300796511 NG_023374 Homo sapiens | GGGCCATAAGATGAG |
| NO: 2399 | retinoid X receptor beta | GAGATTCTGAGGCAG |
| | (RXRB), RefSeqGene on chromosome 6 | GCAAGTCAGCTTTCA |
| | | GGAAAGTTGTTCCTG |
| SEQ ID | GI 241666450 NG_012339 Homo sapiens | AAAAGGCTGCATGCC |
| NO: 2400 | succinate dehydrogenase | TGTGGTTCTGTTGAT |
| | complex flavoprotein subunit A | ACGACATTCTGGAAA |
| | (SDHA), RefSeqGene on chromoso [symbol] | AGGCACATCTAGGGA |
| SEQ ID | GI 237858771 NG_012125 Homo sapiens | AGCTGTGTGGTCTCC |
| NO: 2401 | selectin P | ATGCAGATCTGTCAG |
| | (SELP), RefSeqGene on chromosome 1 | CTGAGGTTGGTGTTA |
| | | GTGAATACTACAGGG |
| SEQ ID | GI 323668281 NG_023034 Homo sapiens | GCTATTGTGTAATGG |
| NO: 2402 | vascular cell adhesion molecule 1 | AGGCCATACTTGGCG |
| | (VCAM1), RefSeqGene on chromosome 1 | GTGGAGTGCAAACAG |
| | | GACTGCAAACAAATG |
| SEQ ID | GI 31563435 NM_144673 Homo sapiens | AGCAAAGGGAAAGAA |
| NO: 2403 | CKLF like MARVEL transmembrane | ATGACTTGGAGGAGG |
| | domain containing 2 | CTCCTGGTGTCTGAA |
| | (CMTM2), transcript variant 1, mRNA [symbol] | ACGGCAGTGTATTTT |
| SEQ ID | GI 183300 M63509 Human | TTCATCGCTTATGAT |
| NO: 2404 | glutathione transferase M2 | GTCCTTGAGAGAAAC |
| | (GSTM2) mRNA, complete cds | CAAGTATTTGAGCCC |
| | | AGCTGCCTGGATGCC |
| SEQ ID | GI 937628170 KP290484 Homo sapiens | AGACTCATCTCAGTG |
| NO: 2405 | OR10J3 | ACCTACACTCATCAC |
| | (OR10J3) gene, complete cds | TCCCCTACTGAACCC |
| | | TGTTGTGTACAGCCT |
| SEQ ID | GI 1139695586 NG_052809 Homo sapiens | TATTGGAGATACGAG |
| NO: 2406 | B-cell CLL/lymphoma 3 | GACCTGGAAACTTGG |
| | (BCL3), RefSeqGene on chromosome 19 | GAGTTCAAGAACAGA |
| | | GGGCCCACAAGGATC |
| SEQ ID | GI 207438642 NG_008645 Homo sapiens | GCTGAAGCAGCCTCC |
| NO: 2407 | dopamine beta-hydroxylase | AGACCTGCTGTCATG |
| | (DBH), RefSeqGene on chromosome 9 | GGTATTTAAGGACCT |
| | | AAATGTTGCTGTCAG |
| SEQ ID | GI 354725887 NG_030444 Homo sapiens | TCAGTTTCAGGTACT |
| NO: 2408 | hepatitis A virus cellular receptor 2 | CAGCAAGATCTTTAC |
| | (HAVCR2), RefSeqGene on chromosome 5 | AAGGGGCTCCCTCAT |
| | | CCTGGAATGCTCCTT |
| SEQ ID | GI 225735562 NG_011713 Homo sapiens | GCTGACTTCATCTCT |
| NO: 2409 | insulin like growth factor 1 | TCAGCAGCCTTCCTT |
| | (IGF1), RefSeqGene on chromosome 12 | CTGGTTTTACAGCCC |
| | | ACACCACAGATTCAG |
| SEQ ID | GI 974987499 NG_023044 Homo sapiens | CGCAAGTCACACACC |
| NO: 2410 | radixin | TGGTTCCCATCCTTG |
| | (RDX), RefSeqGene on chromosome 11 | AGGAATTTGCTATCT |
| | | AAAGGCCCTTGAGTT |
| SEQ ID | GI 164692348 AK314740 Homo sapiens | CAGCCAGGTACTAAA |
| NO: 2411 | cDNA, FLI95602, Homo sapiens | GGAGCTGCTGGGACA |
| | COMM domain containing 4 | GGGGATTGATTATGA |
| | (COMMD4), mRNA | GAAGATCCTGAAGCT |
| SEQ ID | GI 83367074 NM_175617 Homo sapiens | GTGCCTGATGTGGGA |
| NO: 2412 | metallothionein IE | ACAGCTCTTCTCCCA |
| | (MT1E), mRNA | GATGTAAATAGAACA |
| | | ACCTGCACAACCTGG |
| SEQ ID | GI 116069823 EF050529 Homo sapiens | ACTGAAGCGTGGATC |
| NO: 2413 | caspase 10, apoptosis-related | CCTTTTGCTGTATTT |
| | cysteine peptidase | TCTGGTCTGGGGAAT |
| | (CASP10) gene, complete cds | ATGGACTTGCTCAGC |
| SEQ ID | GI 594591631 NG_034042 Homo sapiens | AGGGAAAATAGCTTT |
| NO: 2414 | mitogen-activated protein kinase 11 | CCTTTCCCTCCTGGT |
| | (MAPK11), RefSeqGene on chromosome 22 | GAAGGAAAAAGAGGC |
| | | CACTTTAACCCAGGG |
| SEQ ID | GI 237858721 NG_012100 Homo sapiens | GTATAGCCCCCTGCC |
| NO: 2415 | matrix metallopeptidase 3 | AAGTGGCTATCAACT |
| | (MMP3), RefSeqGene on chromosome 11 | GTGTGGGCATCTTCA |
| | | GTCATAGGGATCTTA |
| SEQ ID | GI 300116221 NG_023260 Homo sapiens | GGGCGCCTTGTTTTG |
| NO: 2416 | oxoglutarate dehydrogenase | CTGCAATATGAACTT |
| | (OGDH), RefSeqGene on chromosome 7 | AAAAGCCAAAGATCC |
| | | AGCATTGCCCCTTTG |
| SEQ ID | GI 1013071127 NG_021208 Homo sapiens | AGCCCACGTGCTAAC |
| NO: 2417 | opioid receptor mu l | AGGAATTGAAAGAAG |
| | (OPRM1), RefSeqGene on chromosome 6 | TGCCATCTTTAACTG |
| | | GGTAGGGCTGACAAG |
| SEQ ID | GI 937500889 NG_032896 Homo sapiens | TATGCCACGTATCAG |
| NO: 2418 | purinergic receptor P2Y1 | GTGACAAGAGGTCTA |
| | (P2RY1), RefSeqGene on chromosome 3 | GCAAGTCTCAACAGT |
| | | TGTGTGGACCCCATT |
| SEQ ID | GI 195927007 NM_052813 Homo sapiens | CACCCCCATGCACAC |
| NO: 2419 | caspase recruitment domain family member 9 | GCCATCTGTGTAACT |
| | (CARD9), transcript variant 1, mRNA | TCAGGATCTGTTCTG |
| | | TTTCACCATGTAACA |
| SEQ ID | GI 954169997 NM_002177 Homo sapiens | TCTTCAGAAAACCTA |
| NO: 2420 | interferon omega 1 | GGGTCCAAGGTTAAG |
| | (IFNW1), mRNA | CCATATCCCAGCTCA |
| | | GTAAAGCCAGGAGCA |
| SEQ ID | GI 193211454 NM_020651 Homo sapiens | ATCTTTCTTGGGGAG |
| NO: 2421 | pellino E3 ubiquitin protein ligase 1 | AAGGCTGCCAAATGG |
| | (PELIl), mRNA | AAGACATCAGATGGA |
| | | CAGATGGATGGCTTG |
| SEQ ID | GI 928192547 NM_006472 Homo sapiens | CTCCCTGCTATATGG |
| NO: 2422 | thioredoxin interacting protein | ATGTCATTCCTGAAG |
| | (TXNIP), transcript variant 1, mRNA | ATCACCGATTGGAGA |
| | | GCCCAACCACTCCTC |
| SEQ ID | GI 678246480 NG_034237 Homo sapiens | TTTTCGTGCCTGAAC |
| NO: 2423 | cytokine receptor like factor 2 | GTTGTCACATAAACC |
| | (CRLF2), RefSeqGene on chromosome X and 7 | CCAAGGCAGCACGTC |
| | | CAAAATGCTGTAAAA |
| SEQ ID | GI 210032106 NG_008851 Homo sapiens | ACAGCTTCACCTCTT |
| NO: 2424 | interleukin 1 beta | TCCTTTCCTTCCACA |
| | (ILIB), RefSeqGene on chromosome 2 | TTGATCAAGTTGTTC |
| | | CGCTCCTGTGGATGG |
| SEQ ID | GI 237858724 NG_012101 Homo sapiens | CCAAGCCAAGGAATT |
| NO: 2425 | matrix metallopeptidase 8 | CCAAGGACTGTAAGC |
| | (MMP8), RefSeqGene on chromosome 11 | CACCAGTAGAAGCTT |
| | | TGAAGAGGCAAGGAA |
| SEQ ID | GI 237858755 NG_012119 Homo sapiens | ACTGGCTAAGACTTC |
| NO: 2426 | protein tyrosine phosphatase, | AGACAGGCTTGTGTC |
| | non-receptor type 1 | CAGACTCTTGAGAAA |
| | (PTPN1), RefSeqGene on | GCTCTGTTGGCTTCT |
| | chromosome 2 [symbol] | |
| SEQ ID | GI 237858758 NG_012120 Homo sapiens | TGTGCTGTCAGCTGT |
| NO: 2427 | RAD51 recombinase | CATTGGCAGAGAGAA |
| | (RAD51), RefSeqGene on chromosome 15 | GGGTGTGGTGGTGTT |
| | | ATGGTATAAGAGACA |
| SEQ ID | GI 1018191682 NG_012337 Homo sapiens | TCATCCTCAGCATGT |
| NO: 2428 | succinate dehydrogenase complex subunit D | TGGCCTGTCACTTTT |
| | (SDHD), RefSeqGene on chromosome 11 | AGGCTCGTCAATTTG |
| | | TGGTCACAGTACAGC |
| SEQ ID | GI 325910867 NM_004874 Homo sapiens | GACCCAGCCTTGCAT |
| NO: 2429 | BCL2 associated athanogene 4 | TTAGCTATCATGCCT |
| | (BAG4), transcript variant 1, mRNA | ACGTCCTGTCTTCCA |
| | | GTCTGTGACAGTGTA |
| SEQ ID | GI 1047600468 NM_001718 Homo sapiens | TCTCCCCTCGTCAGC |
| NO: 2430 | bone morphogenetic protein 6 | GACACCACAAAGAGT |
| | (BMP6), mRNA | TCAAGTTCAACTTAT |
| | | CCCAGATTCCTGAGG |
| SEQ ID | GI 998614224 NM_001320340 Homo sapiens | CAAAACCACATGGGT |
| NO: 2431 | small VCP interacting protein | CGCAGGAGCTAAGGG |
| | (SVIP), transcript variant 1, mRNA | GTGGTACCCAAATGT |
| | | TAGGAACAGTGTTAG |
| SEQ ID | GI 163954920 NG_007086 Homo sapiens | CATGTGAAAACACAG |
| NO: 2432 | arginase 1 | AGACACAGGGAGCGT |
| | (ARG1), RefSeqGene on chromosome 6 | GCCAAGTGAAGATGG |
| | | AGGATTGGAGTGATG |
| SEQ ID | GI 374088072 NG_032029 Homo sapiens | TTGGAGTCTTGTCTC |
| NO: 2433 | MAP kinase interacting | CCATCCCAGCACATT |
| | serine/threonine kinase 1 | GAGGATGTAGTTGGT |
| | (MKNK1), RefSeqGene on chromosome 1 [symbol] | GAATGGACTCTTCCA |
| SEQ ID | GI 1027250665 NG_047132 Homo sapiens | TAGCTGAGATTGGAA |
| NO: 2434 | peroxisome proliferator-activated | TCCATGCCTTCTGGT |
| | receptor gamma, coactivator-related 1 | ATTCAGATCCTTCTC |
| | (PPRC1), RefSeq [symbol] | GCTGCCCCATTAGCT |
| SEQ ID | GI 340523103 NG_029468 Homo sapiens | ATGAACAAGCCTCAC |
| NO: 2435 | SWI/SNF related, matrix associated, | AAGCCCCATCTCTTT |
| | actin dependent regulator of | CTCAATCCCACTTAC |
| | chromatin, subfamily d, m [symbol] | GTTTGCCTGGTTCTC |
| SEQ ID | GI 55953136 NM_002163 Homo sapiens | TAGGGTTTGGGAGAC |
| NO: 2436 | interferon regulatory factor 8 | AGCTCATCCAATCTC |
| | (IRF8), mRNA | CCAAGTCTCATGGTG |
| | | GATTTGTGACTGTGA |
| SEQ ID | GI 26000792 AY186092 Homo sapiens | GTTCGTGTGAGATCT |
| NO: 2437 | interleukin-1 receptor-associated kinase 4 | GGTGGCTTAAAAGAG |
| | (IRAK4) gene, complete cds | TCTGCTCCCCCTTTG |
| | | CCTTCCATTGTGATT |
| SEQ ID | GI 94717611 DQ520733 Homo sapiens | AGCCAATGTCTGAAG |
| NO: 2438 | UDP glucuronosyltransferase | TAGGCAGATGAAAGA |
| | 2 family, polypeptide B4 | GAAAGGGTGGAGATG |
| | (UGT2B4) gene, complete cds | GATCCTGCTCTGAGG |
| SEQ ID | ref \| NG_021140.1\| Homo sapiens | GTGCCCAGGCACCAA |
| NO: 2439 | adiponectin, CIQ and | GCTCAGGCTCAGTTA |
| | collagen domain containing | GGAAGAAAACTTGGC |
| | | AACAGGATAATAGAG |
| SEQ ID | GI 270289769 NG_015961 Homo sapiens | GCTGAAAACGTTTCA |
| NO: 2440 | biglycan | TCACGTCCACTCCTC |
| | (BGN), RefSeqGene on chromosome X | CCAGCAACAGAGGAG |
| | | AACGGATTTCATTGT |
| SEQ ID | GI 359718928 NG_031876 Homo sapiens | GTTGCTTGGGTAGTT |
| NO: 2441 | biliverdin reductase A | CAGGACTGACAGGAC |
| | (BLVRA), RefSeqGene on chromosome 7 | TGGACACCAGGTCTC |
| | | CTGTTTATCCTTGAA |
| SEQ ID | GI 401709981 NG_032894 Homo sapiens | AATGAAATCCAGGAC |
| NO: 2442 | F2R like thrombin or trypsin receptor 3 | ACGCCACTGACTTGC |
| | (F2RL3), RefSeqGene on chromosome 19 | GCCTGTCTGCCAATT |
| | | TTTCCCCATTTAAAA |
| SEQ ID | GI 1042161084 NG_046982 Homo sapiens | GACAATGATGTGAGT |
| NO: 2443 | ficolin 1 | TCTTCGAATTGTGCT |
| | (FCN1), RefSeqGene on chromosome 9 | GAGAAGTTCCAAGGA |
| | | GCCTGGTGGTACGCC |
| SEQ ID | GI 430768625 NG_033035 Homo sapiens | GTAGACTCCAGAAGT |
| NO: 2444 | kelch like family member 40 | TCCAACACTGCTGTC |
| | (KLHL40), RefSeqGene on chromosome 3 | CATCAGCCCTTCGCC |
| | | AAAATATGGATGCTG |
| SEQ ID | GI 815930042 NM_001308319 Homo sapiens | AGATTTACCAGTCTG |
| NO: 2445 | chromodomain helicase | GTGGGAATGTGGCCC |
| | DNA binding protein 9 | TCATGATAGGGATTT |
| | (CHD9), transcript variant 1, mRNA | GCTTATTGGTGCTGC |
| SEQ ID | GI 17059625 AJ420108 Homo sapiens | AGAAGAGCGGCAGTT |
| NO: 2446 | mRNA for F-box only 32 | TCGTGAGCGACCTCA |
| | (FBXO32 gene) | GCAGTTACTGCAACA |
| | | AGGAGGTATACAATA |
| SEQ ID | GI 345441799 NG_029868 Homo sapiens | GCAACCTCTACCATG |
| NO: 2447 | advanced glycosylation | CCAGCCAACTTAGTT |
| | end-product specific receptor | AGCCTTCCTGCTTGT |
| | (AGER), RefSeqGene on chromosome | CTGATCTTCCAACAC |
| SEQ ID | GI 321267517 NG_028118 Homo sapiens | GTAGCAGACAGTGGG |
| NO: 2448 | arrestin beta 1 | GGTGGCTATGATGAC |
| | (ARRB1), RefSeqGene on chromosome 11 | TATCCCTGCTTTCCA |
| | | GACAAGGAGAATGAG |
| SEQ ID | GI 226532444 NG_011794 Homo sapiens | ATGGATGGACAAAAA |
| NO: 2449 | brain derived neurotrophic factor | GTGGCAGTTTGTGGG |
| | (BDNF), RefSeqGene on chromosome 11 | CAATTTGAGCAGTCC |
| | | TTTCATTTGGCGAGA |
| SEQ ID | GI 379642970 NG_032137 Homo sapiens | GAAGACTAATTGAAC |
| NO: 2450 | collagen type IV alpha 2 chain | CCTGCCCCTCCCCTG |
| | (COL4A2), RefSeqGene on chromosome 13 | ACCTCCACTCAGATA |
| | | GCTGATTTAAGCCTC |
| SEQ ID | GI 563317866 NG_033843 Homo sapiens | TTAGGCAGGCTCCCA |
| NO: 2451 | DnaJ heat shock protein family | GTCTGCACAACCTTT |
| | (Hsp40) member C6 | TTGCTGTGTGTCGGA |
| | (DNAJC6), RefSeqGene on chromosome | ATATGTATAACTGGC |
| SEQ ID | GI 223671920 NG_009776 Homo sapiens | GACTGTGAGAGTCCA |
| NO: 2452 | epoxide hydrolase 1 | GTGGAAGGAGGATTC |
| | (EPHX1), RefSeqGene on chromosome 1 | TTTGTCTAAGCGGCA |
| | | GAGAGGGGAAATGAC |
| SEQ ID | GI 261245113 NG_013061 Homo sapiens | ATTAGTTTCCTTTGA |
| NO: 2453 | 3-hydroxymethyl-3- | GGTTTGCTTCTCGTG |
| | methylglutaryl-CoA lyase | GGCTGGTCCAGAATG |
| | (HMGCL), RefSeqGene on chromosome 1 | GAGATCCATTGGCTG |
| SEQ ID | GI 336088631 NG_029118 Homo sapiens | CTTCAAACACCCATT |
| NO: 2454 | RAR related orphan receptor C | GCAGCCACACTTGCT |
| | (RORC), RefSeqGene on chromosome 1 | TCCTTGCTATTCCTC |
| | | GAACACATCAAACCC |
| SEQ ID | GI 226437630 NG_011780 Homo sapiens | TCTCTTGCGACATGT |
| NO: 2455 | sphingomyelin phosphodiesterase 1 | GGATTACCATACCCT |
| | (SMPD1), RefSeqGene on chromosome 11 | TCTTCTTTCCCTCCA |
| | | GCTCACTTTTCCCCT |
| SEQ ID | GI 334358873 NG_029029 Homo sapiens | AACTGGTGTAGTGGG |
| NO: 2456 | sterol regulatory element | TGGTAAACCCAATGC |
| | binding transcription factor 1 | CCACAGGGGCCTTAT |
| | (SREBF1), RefSeqGene on chromoso [symbol] | TACATTGATTTCCTC |
| SEQ ID | GI 927669118 NM_001166693 Homo sapiens | GCCTATACTTCTCTA |
| NO: 2457 | AF4/FMR2 family member 1 | CCTAAGAGGGCAGGA |
| | (AFF1), transcript variant 1, mRNA | GGGAAACCCTACAGC |
| | | TCCTTGTGAGCCTAT |
| SEQ ID | GI 189491779 NM_006507 Homo sapiens | AAGCCACCTCAAGTG |
| NO: 2458 | regenerating family member 1 beta | GACAAGGCACTTACC |
| | (REGIB), mRNA | AACAGAGATTGCTGA |
| | | TTTGCTCCTTAAGCA |
| SEQ ID | GI 146045339 EF543149 Homo sapiens | TGTGCTTATTGTGAC |
| NO: 2459 | prostaglandin E synthase | CTCAGGACCTTTGCA |
| | (PTGES) gene, complete cds | CACACTGGTCTTCCT |
| | | TCCTGGAATGCTTTT |
| SEQ ID | GI 1032528813 NG_050736 Homo sapiens | TGTCTTGTGGTATTC |
| NO: 2460 | complement C3a receptor 1 | AAGCCAATCTGGTGT |
| | (C3AR1), RefSeqGene on chromosome 12 | CAGAATCATCGCAAT |
| | | GTAGGGATGGCCTGC |
| SEQ ID | GI 307611940 NG_027759 Homo sapiens | AGAACGAGCTCATCA |
| NO: 2461 | caspase recruitment domain | GGGCGAGAGACAGGA |
| | family member 11 | TGAACATGAAGGTGA |
| | (CARD11), RefSeqGene on chromosome 7 | CAGGTATTGCATTCA |
| SEQ ID | GI 974987493 NG_012830 Homo sapiens | ACAGAAGTGGCTTTG |
| NO: 2462 | DEAD-box helicase 3, X-linked | GCAAATTTGAACGTG |
| | (DDX3X), RefSeqGene on chromosome X | GTGGAAACAGTCGCT |
| | | GGTGTGACAAATCAG |
| SEQ ID | GI 807045929 NG_029892 Homo sapiens | GTTTAGTCCTTACAT |
| NO: 2463 | potassium voltage-gated | CACACAGCTAACAAA |
| | channel subfamily J member 6 | GGTTGGCAGCCACAG |
| | (KCNJ6), RefSeqGene on chromoso [symbol] | AGCTGCTCACTGTCC |
| SEQ ID | GI 270047500 NG_016132 Homo sapiens | CTATTTAACTGGCTT |
| NO: 2464 | selectin L | CAGCCTCCCCACCTT |
| | (SELL), RefSeqGene on chromosome 1 | CTTCAGCCACCTCTC |
| | | TTTTTCAGTTGGCTG |
| SEQ ID | GI 523498696 NM_002981 Homo sapiens | CAGTTGGATGGGTTC |
| NO: 2465 | C-C motif chemokine ligand 1 | AGAGGCACAGAAAAA |
| | (CCL1), mRNA | TGCTGAGGCACTGCC |
| | | CGTCAAAAAGAAAAT |
| SEQ ID | GI 194018480 NM_001945 Homo sapiens | GGGAAAGACTTCCAT |
| NO: 2466 | heparin binding EGF like growth factor | CTAGTCACAAAGACT |
| | (HBEGF), mRNA | CCTTCGTCCCCAGTT |
| | | GCCGTCTAGGATTGG |
| SEQ ID | GI 119220595 NM_016260 Homo sapiens | ATGGAGAAGGAGAAC |
| NO: 2467 | IKAROS family zinc finger 2 | AGATTAGGGCCTTCA |
| | (IKZF2), transcript variant 1, mRNA | AGTGTGAGCACTGCC |
| | | GAGTCCTTTTCCTAG |
| SEQ ID | GI 257743477 NM_181657 Homo sapiens | AGTTCTTGCTGCGGT |
| NO: 2468 | leukotriene B4 receptor | TTCTGCCCATTTTTT |
| | (LTB4R), transcript variant 1, mRNA | TCATATCCTCTGACA |
| | | GCTGCGAGGTCATCT |
| SEQ ID | GI 257743477 NM_181657 Homo sapiens | CTTCCCTGTCCTCTG |
| NO: 2469 | leukotriene B4 receptor | CTCTGTGGTACTTCC |
| | (LTB4R), transcript variant 1, mRNA | TCTCTGGCTGATTTA |
| | | GCAAACAGCACCTAG |
| SEQ ID | GI 52854080 AY764389 Homo sapiens | AGCACTACAGGCAGA |
| NO: 2470 | baculoviral lAP repeat-containing 3 | ATTGACACTAGAGCC |
| | (BIRC3) gene, complete cds | ATCAGTTTGTGACTT |
| | | CTGGGCTAGAGTGCA |
| SEQ ID | GI 1015539575 AH009651 Homo sapiens | TTCCCTCCAGAGGGA |
| NO: 2471 | xeroderma pigmentosum group C protein | ACGGAGCCAATGAAA |
| | (XPC) gene, complete cds | CTGGCATCGTAATGC |
| | | TGGATTAAAACGTTC |
| SEQ ID | GI 357197116 NG_030591 Homo sapiens | CAGTGAACTATTTCT |
| NO: 2472 | cholecystokinin B receptor | ACACAGTGGGAACTC |
| | (CCKBR), RefSeqGene on chromosome 11 | TGACAAGGGCTGACC |
| | | TGCCTCTCACACACA |
| SEQ ID | GI 209977031 NG_008839 Homo sapiens | CCTGAACTCTGACAT |
| NO: 2473 | 24-dehydrocholesterol reductase | TTCTTCTTTCCCAGG |
| | (DHCR24), RefSeqGene on chromosome 1 | CTTTCCCTTCCCCCC |
| | | TATAGGTCTGGTTCA |
| SEQ ID | GI 268370133 NG_015859 Homo sapiens | CTTGGGAGTTGTGTT |
| NO: 2474 | GATA binding protein 3 | TGAAAACAACCTCTT |
| | (GATA3), RefSeqGene on chromosome 10 | GTGGCCCTGGACTTG |
| | | GTGAAAAAGGCAACT |
| SEQ ID | GI 345110544 NG_029851 Homo sapiens | TGGTCTTGAGCGAAG |
| NO: 2475 | phospholipase D1 | GGTAGGCGAGGGCTG |
| | (PLD1), RefSeqGene on chromosome 3 | ACTTACATTTTCCAA |
| | | GGATCATTCTTCAGA |
| SEQ ID | GI 1030311320 NG_050664 Homo sapiens | AATTTTGTTATGTTG |
| NO: 2476 | sirtuin 1 | TGCGGGCTGGAGTGT |
| | (SIRT1), RefSeqGene on chromosome 10 | AGTGCCCATCCATTG |
| | | GCACGATCATAGAGT |
| SEQ ID | GI 545746351 NM_006228 Homo sapiens | TAGGGGCAGGTGAAA |
| NO: 2477 | prepronociceptin | GGAATAGGAAATTGA |
| | (PNOC), transcript variant 1, mRNA | ACCTGGGGTTTTGAC |
| | | TTGCCACTGCCATAA |
| SEQ ID | GI 324072795 NM_005402 Homo sapiens | CACACACTGACCACA |
| NO: 2478 | RAS like proto-oncogene A | CATTAGGCTGTGTCA |
| | (RALA), mRNA | CCATTGTGTGGTGTA |
| | | CCTGCTGGAAGAATT |
| SEQ ID | GI 1143077143 NG_052860 Homo sapiens | TCAAGAGCATCTTCC |
| NO: 2479 | adiponectin receptor 1 | GCATTCATACAGAAA |
| | (ADIPOR1), RefSeqGene on chromosome 1 | CTGGCAACATCTGGA |
| | | CCCATCTGCTTGGTG |
| SEQ ID | GI 532691848 NG_009095 Homo sapiens | CTGCTCTAACGTTTT |
| NO: 2480 | calcium voltage-gated | TCCCCAACCCTGTCT |
| | channel subunit alphal F | CCGATTTCAATGCCA |
| | (CACNA1F), RefSeqGene on chromosome X | TACTATTCCCAGCCC |
| SEQ ID | GI 224809264 NG_011470 Homo sapiens | TGCCTGTTGTAGTAG |
| NO: 2481 | nitric oxide synthase 2 | CAGCTCTTCTTGCTC |
| | (NOS2), RefSeqGene on chromosome 17 | TCAAAGGTGTCTCGG |
| | | TTGGGACTGTACATT |
| SEQ ID | GI 308522736 NG_027815 Homo sapiens | GTCTCTGAGGTTGGG |
| NO: 2482 | transketolase | TGTGCCACATCCTGT |
| | (TKT), RefSeqGene on chromosome 3 | ATCCTCAGTTTATCT |
| | | GTTTCGGTCTCAGGG |
| SEQ ID | GI 1084352529 NM_000755 Homo sapiens | ATCACCGTGATGGTG |
| NO: 2483 | carnitine O-acetyltransferase | TTCCACCATTTTGGA |
| | (CRAT), transcript variant 1, mRNA | AAAGACTTCCCCAAG |
| | | TCGGAGAAGCTAAGC |
| SEQ ID | GI 91984778 NM_002214 Homo sapiens | CCATAGCCTGTATGA |
| NO: 2484 | integrin subunit beta 8 | ACAGTGTTCCCTGGA |
| | (ITGB8), mRNA | GTTCTCCAGTGCTCA |
| | | GCTTGAGACCTTGAT |
| SEQ ID | GI 1114655579 NM_002969 Homo sapiens | CGTTGACCGCACACT |
| NO: 2485 | mitogen-activated protein kinase 12 | GGATGAATGGAAGCG |
| | (MAPK12), transcript variant 1, mRNA | TGTTACTTACAAAGA |
| | | GGTGCTCAGCTTCAA |
| SEQ ID | GI 115298685 NM_006099 Homo sapiens | GGCACATTCCTTTGG |
| NO: 2486 | protein inhibitor of activated STAT 3 | GTATGTTAACCTAGG |
| | (PIAS3), mRNA | CAGTGGGAGGCAAAT |
| | | GGGATGGTATGTGAG |
| SEQ ID | GI 40807361 NM_004637 Homo sapiens | CAAACACAGTTACAC |
| NO: 2487 | RAB7A, member RAS oncogene family | CCCACATATCTCTCA |
| | (RAB7A), mRNA | CACACACACACACAC |
| | | GCACACACACACACA |
| SEQ ID | GI 319890247 NM_003256 Homo sapiens | AAGCCAACAGCCAGA |
| NO: 2488 | TIMP metallopeptidase inhibitor 4 | AGCAGTATCTCTTGA |
| | (TIMP4), mRNA | CTGGTCAGGTCCTCA |
| | | GTGATGGAAAAGTCT |
| SEQ ID | GI 1049010846 AH002874 Homo sapiens | GAAATCAGCTGCTCA |
| NO: 2489 | MC-CPA gene, complete sequence; | TCAAGATAAGGGCTG |
| | and carboxypeptidase A | AGGCATAAAACTGCC |
| | (CPA3) gene, complete cds | AGAGGGTCTCAAGGC |
| SEQ ID | GI 224809230 NG_011435 Homo sapiens | AGTCCACCTGCAGAG |
| NO: 2490 | alcohol dehydrogenase 1B | ATTCCTCATTTAATT |
| | (class 1), beta polypeptide | GACATGGGCTGTGAC |
| | (ADHIB), RefSeqGene on chromosome [symbol] | CTGGACTGTGGGATA |
| SEQ ID | GI 315506987 NG_028041 Homo sapiens | GCTGGCCCTTCATGA |
| NO: 2491 | adenylate kinase 3 | GCTGAAAAATCTCAC |
| | (AK3), RefSeqGene on chromosome 9 | CCAGTATAGCTGGCT |
| | | GTTGGATGGTAAGTG |
| SEQ ID | GI 270047497 NG_016131 Homo sapiens | CCAGACTTCCTCCTA |
| NO: 2492 | connective tissue growth factor | TAAGTCTGACAGCTC |
| | (CTGF), RefSeqGene on chromosome 6 | CGTGTATGCATTGCG |
| | | TATGGGTCTTGGCTC |
| SEQ ID | GI 1033837679 NG_008338 Homo sapiens | GTGTTCAGAGATACT |
| NO: 2493 | cytochrome P450family 7 subfamily B member 1 | GGAAAGGTGGGGAAC |
| | (CYP7B1), RefSeqGene on chromosome 8 [symbol] | ACAGACAGAGGAACT |
| | | GAGAAGCATCAGCCA |
| SEQ ID | GI 344217739 NG_029805 Homo sapiens | TGTGAGACTGGAACA |
| NO: 2494 | DnaJ heat shock protein family | AGCTTGGCAATTCAA |
| | (Hsp40) member C5 | GACCGGCATTATGGC |
| | (DNAJC5), RefSeqGene on chromosome [symbol] | AGTGAGTTATGAGGG |
| SEQ ID | GI 237874181 NG_012163 Homo sapiens | AACCTAGTCAGGAAC |
| NO: 2495 | HtrA serine peptidase 2 | CTATGGAAAACAGGC |
| | (HTRA2), RefSeqGene on chromosome 2 | TCCAGCTACCACACT |
| | | GAGCATGTGTGAACT |
| SEQ ID | GI 335892866 NG_029106 Homo sapiens | CGTCAAGACAAGCCT |
| NO: 2496 | interferon regulatory factor 7 | TGTGCAAATGGGACT |
| | (IRF7), RefSeqGene on chromosome 11 | CAGTATCTTTGGGCC |
| | | ACTGGACTCATTCAT |
| SEQ ID | GI 970414659 NG_013325 Homo sapiens | GGAGAAATGGCCTAG |
| NO: 2497 | mitogen-activated protein kinase 10 | ATTCTCCCCTCTGTC |
| | (MAPK10), RefSeqGene on chromosome 4 | TCCTGGTGATATCTC |
| | | CCTCCTATTGGCTGA |
| SEQ ID | GI 341572562 NG_029524 Homo sapiens | TACACCGACCTGTTA |
| NO: 2498 | TNF superfamily member 13b | GGCTGTGGCACAGTC |
| | (TNFSF13B), RefSeqGene on chromosome 13 | AACATGGGAGTTGTA |
| | | GACAAGCTACTTGAG |
| SEQ ID | GI 238814317 NG_012266 Homo sapiens | CCATCCCGCACCCTG |
| NO: 2499 | X-box binding protein 1 | TGCTTTCTCTACTCA |
| | (XBP1), RefSeqGene on chromosome 22 | GTTACTCACTACACC |
| | | CTGCTGGACTAAAAG |
| SEQ ID | GI 30841527 AY277591 Homo sapiens | TCACAATAACCTCCC |
| NO: 2500 | GalNAc-T5 | AACCACCAGTGTCAT |
| | (GALNT5) mRNA, complete cds | CATGTGCTTTGTGGA |
| | | TGAAGTGTGGTCCAC |
| SEQ ID | GI 325588345 HQ995528 Homo sapiens | AAGGAGTGTGAGGAA |
| NO: 2501 | testicular nuclear receptor 4 | AAATTTGACCTACAG |
| | (NR2C2) mRNA, complete cds | CTGCCGGAGCAACCA |
| | | AGACTGCATCATCAA |
| SEQ ID | GI 543173138 NM_018202 Homo sapiens | TAATGTCAGCCCTCT |
| NO: 2502 | transmembrane protein 57 | CAGCCATGCAAGACA |
| | (TMEM57), transcript variant 1, mRNA | AAACACAGCACCTGG |
| | | AGAACAGCTTAAGTG |
| SEQ ID | GI 23955951 AF549495 Homo sapiens | GAAAAATGTGGGGAA |
| NO: 2503 | cyclin G2 | TCTTCTGCCAGTAGG |
| | (CCNG2) gene, complete cds | ATTGCTGTCAGCTGC |
| | | TGGGTCAGTTCTCAG |
| SEQ ID | GI 4755084 AFO17178 Homo sapiens | GATGTCAAGGCTGTT |
| NO: 2504 | pro alpha 1(1) collagen | CCACCCCCTCCACAG |
| | (COL1A1) gene, complete cds | GTTCTTACCTTCTAC |
| | | CTCTTTCCTGCTTTA |
| SEQ ID | GI 45238842 AY563103 Homo sapiens | TCTTCTCAGCACTGT |
| NO: 2505 | interleukin 2 receptor, alpha | GCTGAGGAAGTCTTT |
| | (IL2RA) gene, complete cds | AAACCTTCCAGTAGG |
| | | ACATGGGATCCCTGC |
| SEQ ID | GI 352962130 NG_030351 Homo sapiens | GCTGTAGGAAAAATG |
| NO: 2506 | eukaryotic translation initiation | CTATCTGAGTCACTG |
| | factor 2 alpha kinase 2 | CCGTCCTCAAGGCAG |
| | (EIF2AK2), RefSeqGene on chromoso [symbol] | AAAGCAATGGCAGAA |
| SEQ ID | GI 323510659 NG_028143 Homo sapiens | TTCACATTGCTTCTT |
| NO: 2507 | interleukin 18 | CTTGGTGGAAGCTCT |
| | (IL18), RefSeqGene on chromosome 11 | TCCTCTGGCCTTGAA |
| | | AATGCCTGCTTCTCT |
| SEQ ID | GI 1152003149 NG_016599 Homo sapiens | CAATTTGTAAAGCAG |
| NO: 2508 | phosphorylase kinase | GGGTGTCACTCCAAA |
| | regulatory subunit alpha 1 | AGAAGTGGGCCACTG |
| | (PHKA1), RefSeqGene on chromosome X | TTCTCACCACTAGCT |
| SEQ ID | GI 291045304 NG_016710 Homo sapiens | GTTGACCATTTTAAC |
| NO: 2509 | ribose 5-phosphate isomerase A | AAACCGGCAGAATTC |
| | (RPIA), RefSeqGene on chromosome 2 | CTGAGCCTCGTGTTG |
| | | TGAATTGGGGCACAG |
| SEQ ID | GI 402232739 NM_024295 Homo sapiens | TAAACCATGGGGGAT |
| NO: 2510 | derlin 1 | GCAACCCCTTTGCGT |
| | (DERL1), transcript variant 1, mRNA | TTCATATGTAGGCCT |
| | | ACTGGCTTTGTGTAG |
| SEQ ID | GI 514052655 NM_001278549 Homo sapiens | AACACCATGCCAACA |
| NO: 2511 | pyruvate dehydrogenase kinase 1 | GAGGTGTTTACCCCC |
| | (PDK1), transcript variant 1, mRNA | CTATTCAAGTTCATG |
| | | TCACGCTGGGTAATG |
| SEQ ID | GI 1168024004 KY497357 Homo sapiens | CACTCATCCCTACTC |
| NO: 2512 | HLA-DRA | GCCATCATTCTTTCA |
| | (HLA-DRA) gene, complete cds | TTCCTCTTGGCCCAA |
| | | TCTCTCTCCACCACT |
| SEQ ID | GI 1036030212 AH006319 Homo sapiens | TCCGCCGTTTGCTGT |
| NO: 2513 | succinate dehydrogenase subunit C | TTGGGAGTGCGATAC |
| | (SDHC) gene, complete cds | AAAATGAATATGTAC |
| | | GCAGGTGGAACGTAG |
| SEQ ID | GI 1036032775 AH003000 Homo sapiens | ATACGTAACTGCAGC |
| NO: 2514 | steroid 5-alpha-reductase | CAACTATTTTGGAGA |
| | (SRD5A1) gene, complete cds | AATCATGGAGTGGTG |
| | | TGGCTATGCCCTGGC |
| SEQ ID | GI 994323650 NG_011530 Homo sapiens | GTCCAAGCTCAGTCA |
| NO: 2515 | 2′-5′-oligoadenylate synthetase 1 | GCAGAAGAGATAAAA |
| | (OAS1), RefSeqGene on chromosome 12 | GCAAACAGGTCTGGG |
| | | AGGCAGTTCTGTTGC |
| SEQ ID | GI 194018405 NG_008205 Homo sapiens | TTTGCCCAAGTTAGG |
| NO: 2516 | phosphoenolpyruvate carboxykinase 1 | GTGCATCCTTCCCAT |
| | (PCK1), RefSeqGene on chromosome 20 | GAACTTTGACTGTGA |
| | | CCTTTGACTATGGGG |
| SEQ ID | GI 574997036 NG_033896 Homo sapiens | CCAACTTGCAAATGT |
| NO: 2517 | tubulin beta 4A class IVa | GAAATTCAGACACAG |
| | (TUBB4A), RefSeqGene on chromosome 19 | AGAGGAGCACCAGGG |
| | | CAAGGTCATACACCT |
| SEQ ID | GI 38708325 NM_001896 Homo sapiens | CTACGAGGCTCACGT |
| NO: 2518 | casein kinase 2 alpha 2 | CCCGAGCTGGGGTAA |
| | (CSNK2A2), mRNA | TCAAGATGATTACCA |
| | | ACTGGTTCGAAAACT |
| SEQ ID | GI 665505917 NM_006145 Homo sapiens | TTGTGGGTCACACTC |
| NO: 2519 | DnaJ heat shock protein family | TTTACATTTCTGTAA |
| | (Hsp40) member B1 | GGCAATCTTGGCACA |
| | (DNAJB1), transcript variant 1, mRNA | CGTGGGGCTTACCAG |
| SEQ ID | GI 588282795 NM_002168 Homo sapiens | TATTATCTGGCAGTT |
| NO: 2520 | isocitrate dehydrogenase | CATCAAGGAGAAGCT |
| | (NADP(+)) 2, mitochondrial | CATCCTGCCCCACGT |
| | (IDH2), transcript variant 1, mRNA | GGACATCCAGCTAAA |
| SEQ ID | GI 225579058 NM_197965 Homo sapiens | CTTTCCTTTGATTGG |
| NO: 2521 | solute carrier family 10 member 6 | CCATGTCACGGGTTT |
| | (SLC10A6), mRNA | TCTGCTGGCACTTTT |
| | | TACCCACCAGTCTTG |
| SEQ ID | GI 10280531 AB038161 Homo sapiens | TGGCCGGGTGACCAT |
| NO: 2522 | ABCG1 gene for ABC transporter | GTTAAGGCCATTAAA |
| | (ATP-binding cassette, sub-family G | GTCATGCTTGGAGAA |
| | (WHITE), member 1), com [symbol] | ACCACATAGATGCTT |
| SEQ ID | GI 22788696 AF511593 Homo sapiens | CTGCTTAAAGTCAGA |
| NO: 2523 | cyclin D1 | AACAGGTTGAAGGAG |
| | (PRAD1: parathyroid adenomatosis 1) | GTGGAGGCGTGGGAA |
| | (CCND1) gene, complete cds | AGAGTCTAGGAAGGT |
| SEQ ID | GI 42416963 AY534685 Homo sapiens | CTTCCCTCTAAGAAC |
| NO: 2524 | insulin-like growth factor binding protein 5 | CCCACACACAAGGAC |
| | (IGFBP5) gene, complete cds | ACTTTAGGCCACCAT |
| | | GCAAGGTTTTCAGAC |
| SEQ ID | GI 1036032766 AH002941 Homo sapiens | GAAGTGTCAGTCTTG |
| NO: 2525 | plasminogen | GTCATCTATGACACC |
| | (PLG) gene, complete cds | ACACCGGCACCAGAA |
| | | GACCCCAGAAAACTA |
| SEQ ID | GI 238018096 NG_012212 Homo sapiens | TGCCACATGTGCAAC |
| NO: 2526 | C-C motif chemokine ligand 11 | TCAGGCATTCTTGGA |
| | (CCL11), RefSeqGene on chromosome 17 | AACCATCCCTGCGGT |
| | | AGCATATCTTTACTT |
| SEQ ID | GI 284813593 NG_016440 Homo sapiens | CATGGCACACAGCTG |
| NO: 2527 | MAF bZIP transcription factor | TCTCGGTAGCTGCAT |
| | (MAF), RefSeqGene on chromosome 16 | TCCCAGCATGTCCTG |
| | | GTCTAAATATCTAGA |
| SEQ ID | GI 340805863 NG_029510 Homo sapiens | GCTCCTTTGGTGCTG |
| NO: 2528 | protein tyrosine kinase 2 beta | AACTGCACTTGGCAA |
| | (PTK2B), RefSeqGene on chromosome 8 | TAGCCCAGAATGATG |
| | | ACTGTTTTGCAGTTT |
| SEQ ID | GI 22788696 AF511593 Homo sapiens | TCTAAAGGTGAAGGG |
| NO: 2529 | cyclin D1 | ACGTCTACACCCCCA |
| | (PRAD1: parathyroid adenomatosis 1) | ACAAAACCAATTAGG |
| | (CCND1) gene, complete cds | AACCTTCGGTGGTCT |
| SEQ ID | GI 21914605 AY130302 Homo sapiens | ATGGGCTGTCTGGAC |
| NO: 2530 | truncated recombination activating gene 1 | TATCATCCTCTGTGG |
| | (RAG1) gene, complete cds | ATGATTACCCAGTGG |
| | | ACACCATTGCAAAGA |
| SEQ ID | GI 1143077143 NG_052860 Homo sapiens | CTTCCCATTTCTGGA |
| NO: 2531 | adiponectin receptor 1 | CATCCCACTATCCCC |
| | (ADIPOR1), RefSeqGene on chromosome 1 | TCATCGTCAAAATCA |
| | | AAGCCTTGCCCCTTT |
| SEQ ID | GI 1025812271 NG_047045 Homo sapiens | TATTCAGCAGGCAGT |
| NO: 2532 | activating transcription factor 2 | ACCTTCACCAACCTC |
| | (ATF2), RefSeqGene on chromosome 2 | AAGTACTGTAATCAC |
| | | CCAGGCACCATCCTC |
| SEQ ID | GI 601984942 NG_034078 Homo sapiens | TCTGGAGATCTCCAG |
| NO: 2533 | myelin associated glycoprotein | GGGCATCACGGTGAC |
| | (MAG), RefSeqGene on chromosome 19 | AAAGATAATGATCAG |
| | | CACATCATCACTGCA |
| SEQ ID | GI 237858721 NG_012100 Homo sapiens | CATGCAGCTTTCCCT |
| NO: 2534 | matrix metallopeptidase 3 | CGTGGACTTTAGACC |
| | (MMP3), RefSeqGene on chromosome 11 | CATTGGGAAAATGTT |
| | | CTGAGAACCCAGACC |
| SEQ ID | GI 237858735 NG_012106 Homo sapiens | GTAGAACCTTCTGCC |
| NO: 2535 | 8-oxoguanine DNA glycosylase | GCTCCAAGCACCTTC |
| | (OGG1), RefSeqGene on chromosome 3 | TGAGAAATAATGGAT |
| | | CCCCAAAAGCCACTG |
| SEQ ID | GI 238018085 NG_012206 Homo sapiens | ATGACCCACGTGTTT |
| NO: 2536 | protein kinase C alpha | CCCATTTGTGCTTGT |
| | (PRKCA), RefSeqGene on chromosome 17 | TATTTAGAAAGCCAA |
| | | ACTTGGCCCTGCTGG |
| SEQ ID | GI 325910849 NG_028199 Homo sapiens | CACACCTGCCTTGAT |
| NO: 2537 | scavenger receptor class B member 1 | GTGTGACGACGTGAT |
| | (SCARB1), RefSeqGene on chromosome 12 | GATGTGTATGCAGAC |
| | | ACCTGTGTTGATGTG |
| SEQ ID | GI 61676924 NM_012242 Homo sapiens | CGGTCATCAGACTGT |
| NO: 2538 | dickkopf WNT signaling pathway inhibitor 1 | GCCTCAGGATTGTGT |
| | (DKK1), mRNA | TGTGCTAGACACTTC |
| | | TGGTCCAAGATCTGT |
| SEQ ID | GI 359279909 NM_020663 Homo sapiens | TCACCACTTCCCTAA |
| NO: 2539 | ras homolog family member J | TGGGCCACAGGAAGT |
| | (RHOJ), mRNA | AAGTTGATCTTGATG |
| | | GGGAGATCACGTCAC |
| SEQ ID | GI 218083972 NM_134431 Homo sapiens | GGGAGATGCTCGAAG |
| NO: 2540 | solute carrier organic anion | ACCTCAGAATATACA |
| | transporter family member 1A2 | CACCCTTAAGGTTCA |
| | (SLCO1A2), transcript variant 1, [symbol] | AGGGCTGGGGTTGAG |
| SEQ ID | GI 117606489 EF064719 Homo sapiens | ATTTTTTTGACAGGC |
| NO: 2541 | interleukin 27 receptor, alpha | CCATGTTCTGGAAAC |
| | (IL27RA) gene, complete cds | CCCCTTGGTCCTGGG |
| | | CAAATACAAATGGTT |
| SEQ ID | GI 1800224 U70065 Human | TTTTTTTCAAAGGCA |
| NO: 2542 | JAK3 gene, complete cds | TTGGGGTTAACAGGA |
| | | TGGGGTGGTGTTTGA |
| | | GAGGGGGAGGACATA |
| SEQ ID | GI 42716353 AY549314 Homo sapiens | CAAAGTCGAGGAGTG |
| NO: 2543 | tyrosine kinase 2 | GTTATGGTGTGGCAC |
| | (TYK2) gene, complete cds | AGAAGAAGGGTCAGA |
| | | GGACGGTCTTTGTTA |
| SEQ ID | GI 189217843 NG_007930 Homo sapiens | GGGACTTACAGGGAG |
| NO: 2544 | cytochrome P450 family 2 | ATCAGGGAGAGAAGC |
| | subfamily F member 1 | AGAGAGAAGGAGAAA |
| | (CYP2F1), RefSeqGene on chromosome 19 | GCCCAGAGAGCATAA |
| SEQ ID | GI 1025812269 NG_047054 Homo sapiens | CATTCCTCTTCAGGA |
| NO: 2545 | glutathione peroxidase 5 | ATTGCCTCAGCCTAA |
| | (GPX5), RefSeqGene on chromosome 6 | GTTTTTCCCCTTTCC |
| | | AGGGCAGCCTGTATC |
| SEQ ID | GI 293597500 NG_016966 Homo sapiens | GAAAGAGCCTGATCT |
| NO: 2546 | phosphoglucomutase 1 | GGAAGGGGAGTTCTT |
| | (PGM1), RefSeqGene on chromosome 1 | CCACCAGATGTACCT |
| | | CTTCTTGGGCTCAAG |
| SEQ ID | GI 746817461 NG_008863 Homo sapiens | GCACAATGCTTAAGG |
| NO: 2547 | proteolipid protein 1 | CAGTGTTCCAGTGCT |
| | (PLP1), RefSeqGene on chromosome X | GGTGTAGGCTGACCA |
| | | ACTTGTTTTGGTTTT |
| SEQ ID | GI 209977032 NG_008779 Homo sapiens | CTCTTGGTCCAGTCC |
| NO: 2548 | paraoxonase 1 | TTTCTCTCCACATTG |
| | (PON1), RefSeqGene on chromosome 7 | CTGGATTACTGCTGT |
| | | AGCCTCAGCTCATGT |
| SEQ ID | GI 215422398 NG_009053 Homo sapiens | CCAGAAGATACCCTG |
| NO: 2549 | protein activator of interferon | GCTGTTAAACTAGCC |
| | induced protein kinase EIF2AK2 | CTGCTGGGCAAATGA |
| | (PRKRA), RefSeqGene on chro [symbol] | AAAGGCACCTACATT |
| SEQ ID | GI 323422857 NM_001565 Homo sapiens | CTGCCATCCTCCCAA |
| NO: 2550 | C-X-C motif chemokine ligand 10 | GGGGCCCAAATTCTT |
| | (CXCL10), mRNA | TCAGTGGCTACCTAC |
| | | ATACAATTCCAAACA |
| SEQ ID | GI 28178835 NM_005530 Homo sapiens | TAGCAGCCGGTCACC |
| NO: 2551 | isocitrate dehydrogenase 3 | CATCTATGAATTTAC |
| | (NAD(+)) alpha | TGCTGCGCAAAACAT |
| | (IDH3A), mRNA | TTGACCTTTACGCGA |
| SEQ ID | GI 594140701 NM_002661 Homo sapiens | TTGATGACACCATGC |
| NO: 2552 | phospholipase C gamma 2 | GTGAAACTGCTGAGC |
| | (PLCG2), mRNA | CTTTCTTGTTTGTGG |
| | | ATGAGTTCCTCACGT |
| SEQ ID | GI 187473261 EU595874 Homo sapiens | CTCTGAGTCATATCA |
| NO: 2553 | carboxylesterase 3 | TTCTCCTGCTCGAAA |
| | (brain) | GCTCCTGGTGACTCC |
| | (CES3) gene, complete cds | CTGTCTCCCTGAAGA |
| SEQ ID | GI 14488407 AF386492 Homo sapiens | CTCTCTCAGTCCCTC |
| NO: 2554 | serine-cysteine proteinase | TGCATCAAGACACTT |
| | inhibitor clade E member 1 | ACCCATTTCCCACCT |
| | (SERPINEl) gene, complete cds | CATGCCTGCTAACTT |
| SEQ ID | GI 237858689 NG_012090 Homo sapiens | CCAAAGCCCACACAC |
| NO: 2555 | interleukin 13 | TTAACCACCCTGCCT |
| | (IL13), RefSeqGene on chromosome 5 | ATTTCTGTCCAAATG |
| | | TCACCTGTCCTGAAT |
| SEQ ID | GI 296010831 NG_021194 Homo sapiens | TCACTGTTGGTTCGT |
| NO: 2556 | interleukin 1 receptor associated kinase 3 | GTCTTCAGGTAGGTC |
| | (IRAK3), RefSeqGene on chromosome 12 | CAGGAAGTGGGCTCA |
| | | GAAGCACAGATTTAC |
| SEQ ID | GI 296010831 NG_021194 Homo sapiens | GCACTGTGATCTTGG |
| NO: 2557 | interleukin 1 receptor associated kinase 3 | GCAAGTCACTTAATC |
| | (IRAK3), RefSeqGene on chromosome 12 | CCCTGAGGCTCAGTC |
| | | TCTTACCTCATCTGG |
| SEQ ID | GI 210032137 NG_008855 Homo sapiens | GTAGACGTCTTACAC |
| NO: 2558 | lipoprotein lipase | ACATTCACCAGAGGG |
| | (LPL), RefSeqGene on chromosome 8 | TCCCCTGGTCGAAGC |
| | | ATTGGAATCCAGAAA |
| SEQ ID | GI 218749810 NG_009188 Homo sapiens | TAACTTGACTGCTGG |
| NO: 2559 | phosphoglycerate dehydrogenase | GCATTTTTGGACTGT |
| | (PHGDH), RefSeqGene on chromosome 1 | TTGGGAGGGCTCAGC |
| | | TTTCTTGTCTGTCTT |
| SEQ ID | GI 294489300 NG_017057 Homo sapiens | ACAGTAAACCTGGGC |
| NO: 2560 | solute carrier family 27 member 4 | CACTCCAGGGTTACT |
| | (SLC27A4), RefSeqGene on chromosome 9 | GTGAAGGTGACATGA |
| | | GCTGATGTGTATCAG |
| SEQ ID | GI 323276689 NG_028137 Homo sapiens | TCAGATGGACACTGA |
| NO: 2561 | secretory leukocyte peptidase inhibitor | GATGGCCTCTTTAAT |
| | (SLPI), RefSeqGene on chromosome 20 | CAACCAACTTCCCAG |
| | | GCCAATCTCTTCCCT |
| SEQ ID | GI 68215223 NM_003965 Homo sapiens | GCTGGCACCAGAGGA |
| NO: 2562 | C-C motif chemokine receptor like 2 | TGAATATGATGTCCT |
| | (CCRL2), transcript variant 1, mRNA | CATAGAAGGTGAACT |
| | | GGAGAGCGATGAGGC |
| SEQ ID | GI 1128611453 NM_019058 Homo sapiens | CGCATGAATGTAAGA |
| NO: 2563 | DNA damage inducible transcript 4 | GTAGGAAGGGGTGGG |
| | (DDIT4), mRNA | TGTCAGGGATCACTT |
| | | GGGATCTTTGACACT |
| SEQ ID | GI 105990527 NM_012258 Homo sapiens | TTTGAGAAGCAGGGA |
| NO: 2564 | hes related family Bhlh | TCTGCTAAGCTAGAA |
| | transcription factor with YRPW motif 1 | AAAGCCGAGATCCTG |
| | (HEY1), transcript variant 1, | CAGATGACCGTGGAT |
| SEQ ID | GI 392996937 NM_001008387 Homo sapiens | GCTATGCCTTGTTTT |
| NO: 2565 | regenerating family member 3 gamma | TGTCACCAAAATCCT |
| | (REG3G), transcript variant 1, mRNA | GGATGGATGCAGATC |
| | | TGGCTTGCCAGAAGC |
| SEQ ID | GI 2735714 AF004877 Homo sapiens | GCCATCCTTAAGAGG |
| NO: 2566 | pro-alpha 2(1) collagen | ACTGAAGCAGGTTAT |
| | (COL1A2) gene, complete cds | AGAGGAATCGCAGCT |
| | | GTGCACTCCCACTAC |
| SEQ ID | GI 50234988 AY675320 Homo sapiens | CTGCATGAAGCACCA |
| NO: 2567 | RAD21 homolog | AGCAAGCCCTACCTA |
| | (S. pombe) | TTCACAAAGCAGGAA |
| | (RAD21) gene, complete cds | AGAGGGAAGGAAGAG |
| SEQ ID | GI 166235119 NG_007149 Homo sapiens | CCAATACTGTCGAGT |
| NO: 2568 | B-cell CLL/lymphoma 6 | GCCATTCTGCCTTTT |
| | (BCL6), RefSeqGene on chromosome 3 | GAAGACAAGTGCACC |
| | | TTCTTTCCCTTCCCA |
| SEQ ID | GI 953768433 NG_016863 Homo sapiens | CAGATGCGATCGTGT |
| NO: 2569 | delta like non-canonical Notch ligand 1 | GTGTGTGGGGACTGC |
| | (DLK1), RefSeqGene on chromosome 14 | GTATATGTTTTTGTC |
| | | AGTGTGTGTGACCAC |
| SEQ ID | GI 214010161 NG_009030 Homo sapiens | GACAACTAAGGCCCT |
| NO: 2570 | GLI family zinc finger 2 | GTAGGTTGATTCCAG |
| | (GLI2), RefSeqGene on chromosome 2 | AATACACTATCCAGG |
| | | TCCAGGGTGCAGTGG |
| SEQ ID | GI 237874160 NG_012149 Homo sapiens | TTGGACATTTGTTCC |
| NO: 2571 | isocitrate dehydrogenase 3 | TTCCCATTGGGAGCC |
| | (NAD(+)) beta | CAGGAGTTGAGAGAT |
| | (IDH3B), RefSeqGene on chromosome 20 | CATGTCAGCTGTCTA |
| SEQ ID | GI 21435968 AF518727 Homo sapiens | AAGTGGATGGTTCCA |
| NO: 2572 | cyclin El | TTTGCCATGGTTATA |
| | (CCNEl) gene, complete cds | AGGGAGACGGGGAGC |
| | | TCAAAACTGAAGCAC |
| SEQ ID | GI 67515430 DQ088982 Homo sapiens | TACCCTGTCTCCCAC |
| NO: 2573 | glutathione peroxidase 6 | CTGCAGGAATGTCTA |
| | (olfactory) | ACAAAGCATCCATCT |
| | (GPX6) gene, complete cds | TCCTCCTTCTTTGCT |
| SEQ ID | GI 225735572 NG_011717 Homo sapiens | CTCCTGATTGCAGAG |
| NO: 2574 | alpha-2-macroglobulin | CTCCATCTACTCCTG |
| | (A2M), RefSeqGene on chromosome 12 | GAGCTAGGTGATTTA |
| | | GGAGCCAGACCCTTA |
| SEQ ID | GI 339515631 NG_029366 Homo sapiens | TTAGGCCCAGCGAGA |
| NO: 2575 | coagulation factor III, tissue factor | GAGAACAGTTTCTCA |
| | (F3), RefSeqGene on chromosome 1 | AGGTAGGAATGGTGA |
| | | AAAGAAGGGGTGGAC |
| SEQ ID | GI 1135567463 NG_052785 Homo sapiens | ACAGGTAAGATGACA |
| NO: 2576 | galanin and GMAP prepropeptide | CTGTCATGATCATCA |
| | (GAL), RefSeqGene on chromosome 11 | TTCGTCCTGTGCCCT |
| | | GTGGACATCAACCCA |
| SEQ ID | GI 1216866539 NG_012872 Homo sapiens | GTCCTCATCTAGAAC |
| NO: 2577 | gelsolin | CAAAGGAGAGGGGCT |
| | (GSN), RefSeqGene on chromosome 9 | CCAAAAGAATCACCA |
| | | GTGAGGATTGGGTGT |
| SEQ ID | GI 818213488 NG_042142 Homo sapiens | CAAAAGCCCTTCCTC |
| NO: 2578 | inositol 1,4,5-trisphosphate receptor type 2 | ATCTGAGCTGGTCTA |
| | (ITPR2), RefSeqGene on chromosome 12 | GTCTGACCTTTTCCC |
| | | ATCACCCTCCATCTC |
| SEQ ID | GI 226061859 NG_011749 Homo sapiens | GACGTTCACAGCTGA |
| NO: 2579 | peroxisome proliferator | ATCTCAGTGAACAGA |
| | activated receptor gamma | ATAGCAGTCCCTGGA |
| | (PPARG), RefSeqGene on chromosome 3 [symbol] | TGGCAGTCTGCCTAA |
| SEQ ID | GI 294489300 NG_017057 Homo sapiens | GAGATTGAAAAAGTC |
| NO: 2580 | solute carrier family 27 member 4 | GAGCTCTTGCCAGGA |
| | (SLC27A4), RefSeqGene on chromosome 9 | GAAGTGCCAAAGCCA |
| | | CATAGCAGAGGTGTG |
| SEQ ID | GI 674651085 NG_012882 Homo sapiens | CCAAGCCATTCTTTG |
| NO: 2581 | toll like receptor 8 | ACTGCTGACAGGCCT |
| | (TLR8), RefSeqGene on chromosome X | TCCTTCATAACAAGG |
| | | TGTTCCACAGTCCAT |
| SEQ ID | GI 323362950 NM_138621 Homo sapiens | ATGAGTTGTGACAAA |
| NO: 2582 | BCL2 like 11 | TCAACACAAACCCCA |
| | (BCL2L11), transcript variant 1, mRNA | AGTCCTCCTTGCCAG |
| | | GCCTTCAACCACTAT |
| SEQ ID | GI 1040975354 NM_001737 Homo sapiens | AAGCTTCTCCGAGGA |
| NO: 2583 | complement C9 | ACCGTGATTGATGTG |
| | (C9), mRNA | ACTGACTTTGTCAAC |
| | | TGGGCCTCTTCCATA |
| SEQ ID | GI 40807361 NM_004637 Homo sapiens | ATCCAGGCCAGTCCC |
| NO: 2584 | RAB7A, member RAS oncogene family | CGAGATCCTGAAAAC |
| | (RAB7A), mRNA | TTCCCATTTGTTGTG |
| | | TTGGGAAACAAGATT |
| SEQ ID | GI 632794850 NM_002957 Homo sapiens | TACGATTGTCTCTGA |
| NO: 2585 | retinoid X receptor alpha | AACATCGTGGCCTCA |
| | (RXRA), transcript variant 1, mRNA | GGTGCCAGGGTTTGA |
| | | TGGACAGTAGCATTA |
| SEQ ID | GI 1024846747 NG_047015 Homo sapiens | TGGGGCAAACACTCA |
| NO: 2586 | bone gamma-carboxyglutamate protein | TATTCCTGAGGGATA |
| | (BGLAP), RefSeqGene on chromosome 1 | CAGGTCCCCAAATTT |
| | | ATGGCTCCTGGATCT |
| SEQ ID | GI 299782537 NG_023178 Homo sapiens | TACATGGTCTAACCC |
| NO: 2587 | CD14 molecule | CTGCATACCTCTCCA |
| | (CD14), RefSeqGene on chromosome 5 | ATCTGGACTCACCTC |
| | | TTCTGGGACCTTCTC |
| SEQ ID | GI 807045929 NG_029892 Homo sapiens | TCCATCATCACATCA |
| NO: 2588 | potassium voltage-gated | CCCTTTTTCTTTTCT |
| | channel subfamily J member 6 | GTCCCTCCCGCCCTA |
| | (KCNJ6), RefSeqGene on chromosor [symbol] | CCCTTATAAGGACCC |
| SEQ ID | GI 162329557 NG_007161 Homo sapiens | CCTGAGGGAGAGTGA |
| NO: 2589 | MYC proto-oncogene, bHLH transcription factor | GGTTAAGTTCTGAAC |
| | (MYC), RefSeqGene on chromosome 8 | CCACAGGCATTATAT |
| | | CTGCCTGGGGTTCAC |
| SEQ ID | GI 353249887 NG_030361 Homo sapiens | ATCTTGTTACCCGGG |
| NO: 2590 | Spl transcription factor | TCCGGTCATGAGCAT |
| | (SP1), RefSeqGene on chromosome 12 | AGCAACCCAACAGTT |
| | | TTTCCAACATTACCC |
| SEQ ID | GI 338797748 NM_006743 Homo sapiens | CATCCAACTGATGCA |
| NO: 2591 | RNA binding motif | CATTTGTCAAGAACC |
| | (RNP1, RRM) protein 3 | CACTGAGGCTAGAAA |
| | (RBM3), mRNA | CCCCCCAAACACTCA |
| SEQ ID | GI 4455117 AF125158 Homo sapiens | GAAGCCAAGTGCATC |
| NO: 2592 | zinc finger DNA binding protein 99 | TTCCAAACCTTCTTT |
| | (ZNF281) mRNA, complete cds | GGTTGGAGATGGAGA |
| | | AGGTGCCATCCTCTC |
| SEQ ID | GI 189217843 NG_007930 Homo sapiens | ATGGCAAATTCTCTC |
| NO: 2593 | cytochrome P450 family 2 subfamily F member 1 | CCACCTTCCTCACCT |
| | (CYP2F1), RefSeqGene on chromosome 19 [symbol] | CCAGATCCCACCACT |
| | | TTCCTGAATTGTACT |
| SEQ ID | GI 342837712 NG_029640 Homo sapiens | CTTGTGTCTGGGCCA |
| NO: 2594 | mitogen-activated protein | TTTCTCTCACTGTGT |
| | kinase-activated protein kinase 2 | AGGAAAGAGTGGTTC |
| | (MAPKAPK2), RefSeqGene on c [symbol] | CTGTCTTCTCCCTGG |
| SEQ ID | GI 342837712 NG_029640 Homo sapiens | GTGCAAGTCTGGAAG |
| NO: 2595 | mitogen-activated protein | TGTGATGTGAACCTA |
| | kinase-activated protein kinase 2 | GCCCTTCTTGCACAA |
| | (MAPKAPK2), RefSeqGene on c [symbol] | ACTCTCCTTTGCCTT |
| SEQ ID | GI 341572552 NG_029517 Homo sapiens | GCCTAATGCTGTGAT |
| NO: 2596 | retinoid X receptor gamma | ATATGCTGACTTGCA |
| | (RXRG), RefSeqGene on chromosome 1 [symbol] | CAGTGACCCCAAGAT |
| | | CTTCCTGTTGGCAGC |
| SEQ ID | GI 193290120 NG_008160 Homo sapiens | GCTGTGATGTATGCT |
| NO: 2597 | transaldolase 1 | GCTGCTCTGAACACA |
| | (TALD01), RefSeqGene on chromosome 11 [symbol] | TCTGCTGCTATGAAC |
| | | ACATCTGCTGCTCTG |
| SEQ ID | GI 19718735 NM_003265 Homo sapiens | ACGCAAACCCTGGTG |
| NO: 2598 | toll like receptor 3 | GTCCCATTTATTTCC |
| | (TLR3), mRNA [symbol] | TAAAGGGTCTGTCTC |
| | | ACCTCCACATCCTTA |
| SEQ ID | GI 117606575 EF064762 Homo sapiens | TCAGTTAAAATCAAG |
| NO: 2599 | chemokine | TGGGGCATGGGGGAT |
| | (C-C motif) ligand 27 | GGAGGTATGGGGAGG |
| | (CCL27) gene, complete cds [symbol] | TAGTTCCAGAATCAG |
| SEQ ID | GI 39654020 AY496422 Homo sapiens | GGGCCACTGAGCACT |
| NO: 2600 | nuclear factor of kappa light polypeptide | ATTCACCCTCACCTT |
| | gene enhancer in B-cells inhibitor, alpha | TTACTTCACATCAGC |
| | (NFKBIA) gen [symbol] | CCACATCCTAGAGAG |
| SEQ ID | ref\|NG_052974.1\| Homo sapiens | CTTCCATGTCAGTGC |
| NO: 2601 | cyclin A2 | TGAGAGGAAAACTTC |
| | (CCNA2), RefSeqGene on chromosome 4 [symbol] | AGCTTGTGGGCACTG |
| | | CTGCTATGCTGTTAG |
| SEQ ID | GI 224809230 NG_011435 Homo sapiens | GATGCCCTGTGACCC |
| NO: 2602 | alcohol dehydrogenase 1B | CTAGAGAGTGACAGG |
| | (class 1), beta polypeptide | GTTACCTTTGGACAT |
| | (ADHIB), RefSeqGene on chromosome [symbol] | TCCAGATGTTGCTAC |
| SEQ ID | GI 1007399066 NG 029521 Homo sapiens | TCCAAAACAGTAGGA |
| NO: 2603 | SGT1 homolog, MIS12 kinetochore | ATTCAGCTCCTTCCT |
| | complex assembly cochaperone | TCTCGTCCTTTGTTG |
| | (SUGT1), RefSeqGene c [symbol] | TGGGGTGTAGGGGAG |
| SEQ ID | GI 308080224 NG_027757 Homo sapiens | ATTTGGGGTAACCTC |
| NO: 2604 | transforming growth factor beta receptor 3 | AGAGTAGATGTGGTG |
| | (TGFBR3), RefSeqGene on chromosome 1 | TTGGGGTCAGGTGTG |
| | | GAATGAATGTGGTCT |
| SEQ ID | GI 554506569 NM_001114 Homo sapiens | TTCATAACCGGAAGA |
| NO: 2605 | adenylate cyclase 7 | CTTAACCGGTGGCCT |
| | (ADCY7), transcript variant 1, mRNA | CATCACCAGAGCATC |
| | | GCCAGGATTTCTAAT |
| SEQ ID | GI 169646347 NM_001115152 Homo sapiens | CTCATCCTCCCAGGT |
| NO: 2606 | CD300 molecule like family member d | TACTCCATTGCCGCT |
| | (CD300LD), mRNA | AAAATCACTGGTCCA |
| | | ACAACAGTGAATGGC |
| SEQ ID | GI 50659096 NM_005218 Homo sapiens | GAGGTTGTGCAATCC |
| NO: 2607 | defensin beta 1 | ACCAGTCTTATAAAT |
| | (DEFB1), mRNA | ACAGTGACGCTCCAG |
| | | CCTCTGGAAGCCTCT |
| SEQ ID | GI 182995 M68891 Human GATA-binding protein | AAGAAGGAAGGGATC |
| NO: 2608 | (GATA2) mRNA, complete cds | CAGACTCGGAACCGG |
| | | AAGATGTCCAACAAG |
| | | TCCAAGAAGAGCAAG |
| SEQ ID | GI 1139695586 NG 052809 Homo sapiens | GATTGTTGCCCTGTG |
| NO: 2609 | B-cell CLL/lymphoma 3 | ACTGCCTCACATGGC |
| | (BCL3), RefSeqGene on chromosome 19 | GTGAGACAGTTTTAC |
| | | TTAGTGGTTCCATGG |
| SEQ ID | GI 221554534 NG_009447 Homo sapiens | TCTCCTATGGTTTCC |
| NO: 2610 | dual oxidase 2 | TCTCATCCCTCGGCA |
| | (DUOX2), RefSeqGene on chromosome 15 [symbol] | CCTCTTGTTTTCCTT |
| | | TTTCCTGGGTTCCTT |
| SEQ ID | GI 723428434 NG_041793 Homo sapiens | TGTATGTTCTCTGTT |
| NO: 2611 | inhibitor of nuclear factor | GGGAACCCCTCTGTT |
| | kappa B kinase subunit beta | CACAGCCTCTTAAAA |
| | (IKBKB), RefSeqGene on chromosom [symbol] | GAAGCAGCTGGGCTA |
| SEQ ID | GI 1026191091 NG_047061 Homo sapiens | TGGTGTCTGGCATAG |
| NO: 2612 | marker of proliferation Ki-67 | GGGGTGTGATCAATA |
| | (MKI67), RefSeqGene on chromosome 10 [symbol] | CCTAGCATTCTGGCA |
| | | AGGGTCAGTAGAAAC |
| SEQ ID | GI 238018085 NG_012206 Homo sapiens | TCAGGTGCAGCAACC |
| NO: 2613 | protein kinase C alpha | TGACTGATGTTTTTA |
| | (PRKCA), RefSeqGene on chromosome 17 [symbol] | CAAATCACCTTTTGG |
| | | TGGCCTCCTGTCACT |
| SEQ ID | GI 584277093 NM_001675 Homo sapiens | GATTCCCTGGCCAAG |
| NO: 2614 | activating transcription factor 4 | GAGATCCAGTACCTG |
| | (ATF4), transcript variant 1, mRNA [symbol] | AAAGATTTGATAGAA |
| | | GAGGTCCGCAAGGCA |
| SEQ ID | GI 47777672 AY623118 Homo sapiens | GGGGTGGAAGGAAAG |
| NO: 2615 | hexokinase 2 | GGGGGGTGATAGAGA |
| | (HK2) gene, complete cds [symbol] | ACTCTTTTGTCCCCA |
| | | CAGTTATGCTAATGA |
| SEQ ID | GI 62632868 AY995114 Homo sapiens | GAGCTACCTTTTCCT |
| NO: 2616 | tumor necrosis factor receptor 1- | TCCAGTTCAGCCCCA |
| | associated death domain protein | AGGGAAGGGAAAGTA |
| | (TRADD) gene, complete cds [symbol] | GTGCCTCTTTCCTAT |
| SEQ ID | GI 294610641 NG_017089 Homo sapiens | AAGTGCCCTGAGGCC |
| NO: 2617 | galectin 3 | TGACTCAACTCTTCA |
| | (LGALS3), RefSeqGene on chromosome 14 | CTTGTCACCCAGATG |
| | | TGTTAACACCATGTA |
| SEQ ID | GI 340805855 NG_029505 Homo sapiens | CTGTTGCTTCCTTTC |
| NO: 2618 | methyl-CpG binding domain protein 1 | CACTTTTCTTCTTCC |
| | (MBD1), RefSeqGene on chromosome 18 | CTCTTCCTCCCCACA |
| | | GCACAGAGAATTGCC |
| SEQ ID | GI 162329557 NG_007161 Homo sapiens | TACTGCTACGGAGGA |
| NO: 2619 | MYC proto-oncogene, bHLH transcription factor | GCAGCAGAGAAAGGG |
| | (MYC), RefSeqGene on chromosome 8 | AGAGGGTTTGAGAGG |
| | | GAGCAAAAGAAAATG |
| SEQ ID | GI 209447065 NG_008724 Homo sapiens | GCCCAGTGGTTTCAA |
| NO: 2620 | NLR family apoptosis inhibitory protein | GAGGCAAAGAATCTG |
| | (N AIP), RefSeqGene on chromosome 5 | AATGAGCAGCTGAGA |
| | | GCAGCTTATACCAGC |
| SEQ ID | GI 195222745 NM_018290 Homo sapiens | TGACCTTGTTCCTCC |
| NO: 2621 | phosphoglucomutase 2 | TGAGGCTGTTCCTGA |
| | (PGM2), mRNA | ACAGAAAGATCCGGA |
| | | TCCTGAGTTTCCAAC |
| SEQ ID | GI 1015637181 AH000040 Homo sapiens | GTAATCAGCACAGTG |
| NO: 2622 | hematopoietic stem cell antigen | TTCACCACCCCAGCC |
| | (CD34) gene, complete cds | AACGTTTCAACTCCA |
| | | GAGACAACCTTGAAG |
| SEQ ID | GI 114731556 DQ866809 Homo sapiens | ACACACTGACAAATC |
| NO: 2623 | endoglin | AAAACAGCACACCTG |
| | (Osler-Rendu-Weber syndrome 1) | GGCATGTATGGTCTG |
| | (ENG) gene, complete cds [symbol] | GTTCTCCAAGGACAC |
| SEQ ID | GI 357197116 NG_030591 Homo sapiens | TCAATGCTTCAGCCC |
| NO: 2627 | cholecystokinin B receptor | CTATAAACTCAGGGC |
| | (CCKBR), RefSeqGene on chromosome 11 [symbol] | TGGCTGAACCAGGTC |
| | | CTCTCCAAAAGATTA |
| SEQ ID | GI 315013554 NG_027996 Homo sapiens | TCCCTCTCCTTCCCC |
| NO: 2628 | granzyme A | ACTACGTTCCTCTGC |
| | (GZMA), RefSeqGene on chromosome 5 [symbol] | CATTTAACATCGGCA |
| | | TGTCTGAAATGTCTG |
| SEQ ID | GI 237858685 NG_012086 Homo sapiens | TTGGGGAAGGGTCAC |
| NO: 2629 | interleukin 4 receptor | TTCTAAGCTCATACA |
| | (IL4R), RefSeqGene on chromosome 16 [symbol] | ATATTGGTGACATTC |
| | | AGTCCCTGGCAGGCT |
| SEQ ID | GI 227908850 NG_011958 Homo sapiens | CCGAGAAGGAATCTC |
| NO: 2630 | noggin | AGGAAGTTTGTTTAC |
| | (NOG), RefSeqGene on chromosome 17 [symbol] | ACTGGGGGCCTGGAG |
| | | ACCTTCGGGAAAATA |
| SEQ ID | GI 241896851 NG_012345 Homo sapiens | CAGTCCTTCTCATCT |
| NO: 2631 | peroxisome proliferator activated receptor delta | CACCCAGGATCACCT |
| | (PPARD), RefSeqGene onchromosome 6 [symbol] | GGGAGTGACCAAAGT |
| | | AGGCCAAATGTGATT |
| SEQ ID | GI 343432629 NG_029716 Homo sapiens | CCCATCATGGTGCCA |
| NO: 2632 | transient receptor potential | TTTAGGAAGCATCTG |
| | cation channel subfamily V member 1 | AGTGCTCACCATTTA |
| | (TRPV1),RefSeqGene on [symbol] | GCCACATCGAGCATT |
| SEQ ID | GI 1151099595 NG_052968 Homo sapiens | AAGACTCTGAAACGA |
| NO: 2633 | ubiquitin like modifier activating enzyme 5 | GAAGGTGTTTGTGCA |
| | (UBA5), RefSeqGene on chromosome 3 [symbol] | GCCAGTCTTCCTACC |
| | | ACTATGGGTGTGGTT |
| SEQ ID | GI 308522770 NM_005469 Homo sapiens | ATTGACCAGTATTTA |
| NO: 2634 | acyl-CoA thioesterase 8 | AGGGACCCTAACCTC |
| | (ACOT8), mRNA [symbol] | CAAAAGAGGTACCCA |
| | | TTGGCGCTCAACCGA |
| SEQ ID | GI 156546893 NM_001101802 Homo sapiens | GTTTTGGGAGTCAGC |
| NO: 2635 | PHD finger protein 21A | TAGTATGGAGTACGA |
| | (PHF21A), transcript variant 1, mRNA [symbol] | GATGCAACCCAGCCC |
| | | CCAAACCTACATTCT |
| SEQ ID | GI 306140488 NM_030956 Homo sapiens | ACTTCTGCTGTCTCC |
| NO: 2636 | toll like receptor 10 | ACTTTGATCTGCCCT |
| | (TLR10), transcript variant 1, mRN [symbol] | GGTATCTCAGGATGC |
| | | TAGGTCAATGCACAC |
| | | A |
| SEQ ID | GI 164695782 AK315592 Homo sapiens | CAGGCGTGGACTCTT |
| NO: 2637 | cDNA, FLI96670, Homo sapiens | TCTATCTCGAGATCT |
| | toll interacting protein | TCGATGAGAGAGCCT |
| | (TOLLIP), mRNA [symbol] | TCTCCATGGACGACC |
| SEQ ID | GI 90657251 DQ451402 Homo sapiens | CAGCCGCTAGCATCC |
| NO: 2638 | heat shock 70 kDa protein 1A | TAGAAGTAATTCCCT |
| | (HSPA1A) gene, complete cds [symbol] | CCTCCTTGGAAAACG |
| | | CCCACTACAATCCTT |
| SEQ ID | GI 338221701 NG_029188 Homo sapiens | CTGGGCCTTAGACTC |
| NO: 2639 | caspase 9 | CAGAGTACTGCATGG |
| | (CASP9), RefSeqGene on chromosome 1 [symbol] | GAATGTTTCCCAAGG |
| | | TAGGTTTCATGGTGA |
| SEQ ID | GI 307746866 NG_027761 Homo sapiens | TCAATGTTGCCGCAG |
| NO: 2640 | heat shock protein family A | GATTACAAGCCCTGC |
| | (Hsp70) member 5 | TGAAAGAGATGCATG |
| | (HSPA5), RefSeqGene on chromosome 9 [symbol] | ATGCAACCTCTGTAG |
| SEQ ID | GI 939106626 NG_029107 Homo sapiens | TCTTAAAGACACGGT |
| NO: 2641 | integrin subunit alpha 3 | TGTGGTCAGCGGCTT |
| | (ITGA3), RefSeqGene on chromosome 17 | CAGTCCTAGCTCTGC |
| | | CTCCCATAAAATTCA |
| SEQ ID | GI 207444685 NG_008651 Homo sapiens | ACCCGTGATTCTGAA |
| NO: 2642 | NLRfamily pyrin domain containing 12 | TCAGCAGGTCTTAGG |
| | (NLRP12), RefSeqGene on chromosome 19 | CAACAGGAATCTGCA |
| | | TTTTGATGTGGCTGG |
| SEQ ID | GI 293597503 NG_016969 Homo sapiens | TTCCAAGAACATGTC |
| NO: 2643 | solute carrier family 6 member 2 | CCAAGCAGACAAGCC |
| | (SLC6A2), RefSeqGene on chromosome 16 | CCAGTGATGTACAAG |
| | | TAGCTCTTCCAGTCA |
| SEQ ID | GI 196259816 NG_008365 Homo sapiens | CTCTCCACTAGGGCT |
| NO: 2644 | steroid 5 alpha-reductase 2 | TCTCTGATACTACCC |
| | (SRD5A2), RefSeqGene on chromosome 2 | AGGCCAGCAGGAGGA |
| | | TGTGGAGTTAAGAAA |
| SEQ ID | GI 42794755 NM_016234 Homo sapiens | TCCAAGGGGATATTC |
| NO: 2645 | acyl-CoA synthetase long chain family member 5 | GGTTGCTGGCTGACG |
| | (ACSL5), transcript variant 1, mRNA | ACATGAAGACTTTGA |
| | | AGCCCACATTGTTTC |
| SEQ ID | GI 172072641 NM_005373 Homo sapiens | AACAAATCCAGGACT |
| NO: 2646 | MPL proto-oncogene, thrombopoietin receptor | ACAGACCCCACAGTT |
| | (MPL), mRNA | CTCTCGCTGCCACTT |
| | | CAAGTCACGAAATGA |
| SEQ ID | GI 633257761 NM_001143836 Homo sapiens | CCACCAGATGTTGGG |
| NO: 2647 | NADPH oxidase 4 | GCTAGGATTGTGTCT |
| | (NOX4), transcript variant NOX4B, mRNA | AAGCAGAGCCTCAGC |
| | | ATCTGTTCTTAACCT |
| SEQ ID | GI 756761760 NM_152901 Homo sapiens | CGCCTCCTCCAGCCC |
| NO: 2648 | pyrin domain containing 1 | CTGCACCTGTCATTT |
| | (PYDC1), mRNA | ATTCTTCCACTGCCC |
| | | AATAAATATTCATGG |
| SEQ ID | GI 1036029697 AH005415 Homo sapiens | TTGCGTCCCGCTGAG |
| NO: 2649 | bradykinin B1 receptor | ATGTCACTAGCAGAA |
| | (BDKRB1) gene, complete cds | AAAGGGAACACAAGC |
| | | AAAAGGCAAGATTCT |
| SEQ ID | GI 117606559 EF064754 Homo sapiens | TTCACCCTGGAGCCC |
| NO: 2650 | CD40 molecule, TNF receptor | ATCCAGTCTCCCAAC |
| | superfamily member 5 | TTGTATTAAAGACAG |
| | (CD40) gene, complete cds | AGGCAGAAGTTTGGT |
| SEQ ID | GI 117606557 EF064753 Homo sapiens | TGGAAGACAGCAATC |
| NO: 2651 | CD40 ligand | ATGGTGGCCAAGCCT |
| | (TNF superfamily, member 5, | TGACTGAGCTTTTTC |
| | hyper-IgM syndrome) | TTCTCCAGGCTAAAG |
| | (CD40LG) gene, complete cds [symbol] | |
| SEQ ID | GI 20160210 AY094608 Homo sapiens | CATTCTAGACACCCT |
| NO: 2652 | cyclin-dependent kinase inhibitor 2C | CCCCAACCCCACATC |
| | (CDKN2C) gene, complete cds | CCCAAAATCCAAGCC |
| | | ACTTCTAAGTAGTGA |
| SEQ ID | GI 237820664 NG_012051 Homo sapiens | GTCCTCACACTGGGT |
| NO: 2653 | caveolin 1 | GAGCAGCTTATGGTG |
| | (CAV1), RefSeqGene on chromosome 7 | ATTCCAGACATGATC |
| | | TCTGTTGGGAGTGAC |
| SEQ ID | GI 315360648 NG_028024 Homo sapiens | AGAAGAGCATTCCTG |
| NO: 2654 | glucokinase regulator | TTAGGTCATTCACCA |
| | (GCKR), RefSeqGene on chromosome 2 | AGTCCCAGAAGGGGG |
| | | ACTGGGCATGATATG |
| SEQ ID | GI 302058260 NG_023447 Homo sapiens | ACCATGCCTAGCAAG |
| NO: 2655 | resistin | AGGCATTAATTTTGT |
| | (RETN), RefSeqGene on chromosome 19 | CATGTTTGCATCAGC |
| | | CACCCTTGCATGCAA |
| SEQ ID | GI 45243468 NM_002934 Homo sapiens | AGAGATCAACGACGA |
| NO: 2656 | ribonuclease A family member 2 | GACCCTCCACAGTAT |
| | (RNASE2), mRNA | CCGGTGGTTCCAGTT |
| | | CACCTGGATAGAATC |
| SEQ ID | GI 24079970 AF550128 Homo sapiens | GTTCTAAGCAGAAGC |
| NO: 2657 | excision repair cross- | CCTGTTGCCTTTCTG |
| | complementing rodent repair deficiency, | ACCTAGCTTTGGAAG |
| | complementation group 5 | TTGTGCAGCATCCTT |
| | (ERCC [symbol] | |
| SEQ ID | GI 270047497 NG_016131 Homo sapiens | CCAGGGAGAATAAAG |
| NO: 2658 | connective tissue growth factor | CCTATTCTTTCCTTG |
| | (CTGF), RefSeqGene on chromosome 6 | TCCTGACCTCACTCC |
| | | CTCAGGCTGCATGTT |
| SEQ ID | GI 226492969 NG_011817 Homo sapiens | GAGTGGATTGGTGGG |
| NO: 2659 | LIF receptor alpha | GAGCAAGACTGGAAA |
| | (LIFR), RefSeqGene on chromosome 5 | CAAGAGGACCACTTC |
| | | AGAGGCTCTTATAGC |
| SEQ ID | GI 608785172 KJ534783 Homo sapiens | GAATCCAGAAGCAGA |
| NO: 2660 | clone BZRAPl_iso-A_ | GCTTCCGCTGACAGC |
| | adult-A09 benzodiazapine | TGGCGAGTACATCTA |
| | receptor peripheral- | CATCTATGGCAACAT |
| | associated protein | |
| | 1 isofo [symbol] | |
| SEQ ID | GI 1145587777 KX533498 Homo sapiens | CTACAGTGGTACCTG |
| NO: 2661 | macrophage receptor | GGGGACAATTTGCGA |
| | (MARCO) mRNA, complete cds | TGACGAGTGGCAAAA |
| | | TTCTGATGCCATTGT |
| SEQ ID | GI 22859017 AY148100 Homo sapiens | GGAGCAAGCCGCTGG |
| NO: 2662 | colony stimulating factor 3 receptor | ATATCTGGAGGGAAA |
| | (granulocyte) | ACATTTCAAGCAGAA |
| | (CSF3R) gene, complete cds | GTAACAACCAGTGCA |
| SEQ ID | GI 363807289 NG_031933 Homo sapiens | TGGTGTTACAACAAC |
| NO: 2663 | BMP binding endothelial regulator | TGGACCTCCAATGGG |
| | (BMPER), RefSeqGene on chromosome 7 | GTGATTAGTCCTTTA |
| | | CCTTGGCGTCACTCA |
| SEQ ID | GI 225735577 NG_011719 Homo sapiens | GATGGTTTTCTGGTG |
| NO: 2664 | integrin subunit alpha M | TCCCTTTAGGTCCCA |
| | (ITGAM), RefSeqGene on chromosome 16 | GCCAGTACTGAGAGT |
| | | CAAGGCAATCATGGA |
| SEQ ID | GI 238018085 NG_012206 Homo sapiens | GTTCCTTGGAGCAAT |
| NO: 2665 | protein kinase C alpha | TCTCAGAGCTAGGCT |
| | (PRKCA), RefSeqGene on chromosome 17 | GCTTAAGGCATATGA |
| | | GGGCTCAGGACTCAG |
| SEQ ID | GI 229577394 NG_011993 Homo sapiens | ACTTAGCACACTAGG |
| NO: 2666 | thymocyte selection associated | AGGTGGAATCCTATG |
| | high mobility group box | CCCAGAGTGATGAGA |
| | (TOX), RefSeqGene on chromosome [symbol] | TGGGGCTAGCTAGTG |
| SEQ ID | GI 356461041 NM_014329 Homo sapiens | CTGCATTGGGATTTT |
| NO: 2667 | enhancer of mRNA decapping 4 | GGCCAAGGAGGTGGA |
| | (EDC4), mRNA | GATTGTGGCTAGCAG |
| | | TGACTCTAGCATTTC |
| SEQ ID | GI 261337164 NM_206943 Homo sapiens | ACCTGCGATTGCTTT |
| NO: 2668 | latent transforming growth | GATGGGTATCACTTG |
| | factor beta binding protein 1 | GATACGGCCAAGATG |
| | (LTBP1), transcript variant 1, mRN [symbol] | ACCTGTGTCGATGTA |
| SEQ ID | GI 4885488 NM_005372 Homo sapiens | GGGCGTGACGCCTAA |
| NO: 2669 | MOS proto-oncogene, serine/ | AGCCGACATTTATTC |
| | threonine kinase | CTTTGCCATCACTCT |
| | (MOS), mRNA | CTGGCAAATGACTAC |
| SEQ ID | GI 166064064 NM_002831 Homo sapiens | CATGACACAACCGAA |
| NO: 2670 | protein tyrosine phosphatase, | TACAAACTCCGTACC |
| | non-receptor type 6 | TTACAGGTCTCCCCG |
| | (PTPN6), transcript variant 1, mRNA | CTGGACAATGGAGAC |
| SEQ ID | GI 81301989 DQ217942 Homo sapiens | TAGAGGAATGAGGTC |
| NO: 2671 | EGF-like module containing | TCCCACTGTCACCAA |
| | mucin-like hormone receptor-like 1 | ACAGAACTAGGTCCA |
| | (EMR1) gene, complete cds | TTTGCCCATGTGCAA |
| SEQ ID | GI 219521817 NG_009217 Homo sapiens | GAGTGATTGAGATTT |
| NO: 2672 | cathepsin B | GCGTTGTTGTGGAGA |
| | (CTSB), RefSeqGene on chromosome 8 | GAAAGGCGCCTGTTG |
| | | CACAATGGAGTGAGA |
| SEQ ID | GI 219689119 NG_009261 Homo sapiens | GCAGAGGAAATGTCA |
| NO: 2673 | elastin | ACCCACCTGCAATCC |
| | (ELN), RefSeqGene on chromosome 7 | TGCATTCAGGACCAA |
| | | CTGTCACTTCCATAC |
| SEQ ID | GI 353409895 NG_030365 Homo sapiens | TTCGACTCCGGGTGT |
| NO: 2674 | POU class 2 homeobox 2 | GTGAGTTTGTATACT |
| | (POU2F2), RefSeqGene on chromosome 19 | TTTTACGTGTGTCTG |
| | | GCTGGCTGTGTGTCA |
| SEQ ID | GI 1069415403 NG_032899 Homo sapiens | CAGAGATTACCAAGC |
| NO: 2675 | protein C receptor | ATGGTTCCATAGCCT |
| | (PROCR), RefSeqGene on chromosome 20 | AGAGGAGTCCAGTGT |
| | | GGCCTGTGTGTGTTT |
| SEQ ID | GI 341572562 NG_029524 Homo sapiens | GTAGTCCCCCCATGT |
| NO: 2676 | TNF superfamily member 13b | GCCTACTCACTGATG |
| | (TNFSF13B), RefSeqGene on chromosome 13 | GCTACTGTCTTCTCT |
| | | CTGTCCCTTTCATCT |
| SEQ ID | GI 344925862 NG_029825 Homo sapiens | GGGTGGGTATTCTGT |
| NO: 2677 | ubiquitin specific peptidase 2 | TGTGGGCAAGCTTTA |
| | (USP2), RefSeqGene on chromosome 11 | ACATTTAGTTCCGAG |
| | | TGCGCAACATGGAGA |
| SEQ ID | GI 209447082 NG_008731 Homo sapiens | GGCACCTCTTGTCGG |
| NO: 2678 | vitamin D receptor | GTCATCACGATCTGT |
| | (VDR), RefSeqGene on chromosome 12 | ACCCATATCTTCACC |
| | | CAAGGACTGTTTGTC |
| SEQ ID | GI 254039651 NG_012413 Homo sapiens | GTGGCTGCCAAGAAC |
| NO: 2679 | vimentin | CTGCAGGAGGCAGAA |
| | (VIM), RefSeqGene on chromosome 10 | GAATGGTACAAATCC |
| | | AAGGTAGGAAACAAA |
| SEQ ID | GI 928192547 NM_006472 Homo sapiens | GAGTACCTGCGCTAT |
| NO: 2680 | thioredoxin interacting protein | GAAGACACGCTTCTT |
| | (TXNIP), transcript variant 1, mRNA | CTGGAAGACCAGCCA |
| | | ACAGGTGAGAATGAG |
| SEQ ID | GI 94717603 DQ508420 Homo sapiens | ATGTGTCTTATTAGC |
| NO: 2681 | caspase 5, apoptosis- | CAGCAATGTGGCTCA |
| | related cysteine peptidase | GGCTCGTCCTCATTT |
| | (CASP5) gene, complete cds | AGGTTCAGGTGTCCA |
| SEQ ID | GI 21885466 AY128534 Homo sapiens | AAATGCCAAAAGTGC |
| NO: 2682 | cyclin-dependent kinase 6 | CCAGATTGAGAAACC |
| | (CDK6) gene, complete cds | CCTTAACATAGTTAT |
| | | GCCTGGCTACCCCCG |
| SEQ ID | GI 45238842 AY563103 Homo sapiens | GTACAGGAAACTCTA |
| NO: 2683 | interleukin 2 receptor, alpha | GCCACTCGTCCTGGG |
| | (IL2RA) gene, complete cds | ACAACCAATGTCAAT |
| | | GCACAAGCTCTGGTA |
| SEQ ID | GI 198442852 NG_008474 Homo sapiens | GGAAGGGCTTTTGGG |
| NO: 2684 | aryl hydrocarbon receptor | AATTTTCTGGGGCCC |
| | interacting protein like 1 | TAAATGTTGAGTGAG |
| | (AIPL1), RefSeqGene on chromosome 17 [symbol] | AAGAAAGGGAGTCCG |
| SEQ ID | GI 297307113 NG_021395 Homo sapiens | CAGGAGCATGGCCTA |
| NO: 2685 | erythropoietin receptor | GCACTGTGCAAACAC |
| | (EPOR), RefSeqGene on chromosome 19 | TCAACTGCTGGTCGT |
| | | TGCAAGGATTATTAT |
| SEQ ID | GI 374349247 NG_032044 Homo sapiens | GGACTTCTGAACAGA |
| NO: 2686 | glutamic-oxaloacetic transaminase 1 | CAGTCATAAGGAAGG |
| | (GOT1), RefSeqGene on chromosome 10 | CAGGAGGCAGTGAGA |
| | | ACACCAGGCTCTTTC |
| SEQ ID | GI 226493744 NG_011821 Homo sapiens | CCCAACCTAAACTGA |
| NO: 2687 | nuclear receptor subfamily | ATGTGTTTTTAATGG |
| | 4 group A member 2 | CAATGAGGGAGGGGG |
| | (NR4A2), RefSeqGene on chromosome 2 | AAGCGTGCAGAGTGA |
| SEQ ID | GI 1154345445 NG_033859 Homo sapiens | TGATGCCCTGCTTTG |
| NO: 2688 | sodium voltage-gated | GTTTTGTCTATGCCA |
| | channel alpha subunit 11 | AAAGTTCCTGCTATA |
| | (SCN11A), RefSeqGene on chromosome 3 | CCCACAGTGGTGGTC |
| SEQ ID | GI 442092991JQ924061 Homo sapiens | CTGTTTCGTCCTGTG |
| NO: 2689 | ATG5 | GCTGCAGATGGACAG |
| | (ATG5) mRNA, complete cds | TTGCACACACTAGGA |
| | | GATCTCCTCAAAGAA |
| SEQ ID | GI 323362950 NM_138621 Homo sapiens | CTTGGGCTTTGCCGC |
| NO: 2690 | BCL2 like 11 | CCTTATGATGAAGTG |
| | (BCL2L11), transcript variant 1, mRNA | TGTGTTTGATGCCAG |
| | | TGAGAAACTCAGTCT |
| SEQ ID | GI 23110953 NM_001911 Homo sapiens | TGCGAGAAGACTTTG |
| NO: 2691 | cathepsin G | TGCTGACAGCAGCTC |
| | (CTSG), mRNA | ATTGCTGGGGAAGCA |
| | | ATATAAATGTCACCC |
| SEQ ID | GI 164696344 AK313967 Homo sapiens | GACACCAAAAGCTTC |
| NO: 2692 | cDNA, FLI94614, Homo sapiens | ATCTTGGTGAGAAAA |
| | interleukin 18 receptor 1 | GCAGACATGGCTGAT |
| | (IL18R1), mRNA | ATCCCAGGCCACGTC |
| SEQ ID | GI 164690417 AK312618 Homo sapiens | ACCACAAAATCCAGG |
| NO: 2693 | cDNA, FLI93000, Homo sapiens | AGCAAATTCTGCCAG |
| | RAB5A, member RAS oncogene family | AGGAAGAGGAGTAGA |
| | (RAB5A), mRNA | CCTTACCGAACCCAC |
| SEQ ID | GI 40288424 AY506357 Homo sapiens | GCTGCGCCCCAAGTC |
| NO: 2694 | truncated epidermal growth factor | AAAGTAATAGAGCCA |
| | (beta-urogastrone) | CAGTTTCACCATCAG |
| | (EGF) gene, complete cds | GCCATTTTCTGATGA |
| SEQ ID | GI 1059792660 AH007003 Homo sapiens | AAGCCTGGGAGGTAG |
| NO: 2695 | MET proto-oncogene, intron 2, 3′ end | ATCTCAAAAGTTCTT |
| | | TCTACCCACACTGCT |
| | | TCTCCATCACGCCAC |
| SEQ ID | GI 7417326 AF237581 Homo sapiens | GCAAGAGGAAGGTAT |
| NO: 2696 | migration inhibitory factor- | CATCAGAATTGCCCT |
| | related protein 14 variant P | TAACCAGGAACCAGA |
| | (S100A9) gene, complete cds | ATAGCTGGGTCCCCT |
| SEQ ID | GI 1206876284 NG_033870 Homo sapiens | TCTATGATCCACCAC |
| NO: 2697 | asparagine synthetase | ATTCCGTTTCCCCTG |
| | (glutamine-hydrolyzing) | AAGGGTGATCAAGGA |
| | (ASNS), RefSeqGene on chromosome 7 | CACATGCAGAGATGG |
| SEQ ID | GI 930697465 NM_005564 Homo sapiens | CCTGGATTAACGAGT |
| NO: 2698 | lipocalin 2 | TACCTCGTCCGAGTG |
| | (LCN2), mRNA | GTGAGCACCAACTAC |
| | | AACCAGCATGCTATG |
| SEQ ID | GI 315630394 NM_002611 Homo sapiens | GATGCCTACGACATG |
| NO: 2699 | pyruvate dehydrogenase kinase 2 | GCTAAGCTCCTGTGT |
| | (PDK2), transcript variant 1, mRNA | GACAAGTATTACATG |
| | | GCCTCACCTGACCTG |
| SEQ ID | GI 746815979 NM_032525 Homo sapiens | CCAACTCAGATCCTA |
| NO: 2700 | tubulin beta 6 class V | CAACACGCAAGTTCC |
| | (TUBB6), transcript variant 1, mRNA | TTCTTGAACCCTGGT |
| | | GCCTCCTACCCTATG |
| SEQ ID | GI 62003164 AY974245 Homo sapiens | TTCCACAGGTAGGGG |
| NO: 2701 | alcohol dehydrogenase 4 | TGTCTTCCAGTCCTG |
| | (class II), pi polypeptide | GGTGAAGAAAACATT |
| | (ADH4) gene, complete cds | TATGCATAGCACCCT |
| SEQ ID | GI 88698111 DQ388429 Homo sapiens | GAGAAATTGCAGGTG |
| NO: 2702 | heat shock 70 kDa protein 1B | CCCGTCTTGATTAGA |
| | (HSPA1B) gene, complete cds | GTGGGGCTTGTTTCA |
| | | GGGAAAAGTCGGATG |
| SEQ ID | GI 298676536 NG_021477 Homo sapiens | CCTCCAGTTCAAGGA |
| NO: 2703 | glutamate decarboxylase 1 | CTTTGGGGCCTCTGT |
| | (GAD1), RefSeqGene on chromosome 2 | CTGAGATGCTTAGAA |
| | | ACAGCTCAGACTGTG |
| SEQ ID | GI 237858602 NG_012146 Homo sapiens | ATGAGGCCTGAAGAG |
| NO: 2704 | period circadian clock 2 | AGAGCCTCAGACAAG |
| | (PER2), RefSeqGene on chromosome 2 | AAGGAGGAAATCAAA |
| | | GAATAACGCCAGGCC |
| SEQ ID | GI 14278710 AF374726 Homo sapiens | TTGATGGAGGTGAAA |
| NO: 2705 | coagulation factor 11 receptor-like 2 | ACGGGGGCCTCTGAA |
| | (F2RL2) gene, complete cds | GGAAACAAAGAGGCA |
| | | GTGAATTTGCTTTCT |
| SEQ ID | GI 375331875 NM_000895 Homo sapiens | CCTGAACAGACTTCT |
| NO: 2706 | leukotriene A4 hydrolase | GGGAAGGAACACCCA |
| | (LTA4H), transcript variant 1, mRNA | TATCTCTTTAGTCAG |
| | | TGCCAGGCCATCCAC |
| SEQ ID | GI 187473251 EU600171 Homo sapiens | GAGGGGTTTAAGGCT |
| NO: 2707 | v-raf murine sarcoma viral | CCGCGGGTCATTCTC |
| | oncogene homolog B1 | ATTTACAGCTGTTGC |
| | (BRAF) gene, complete cds | TCAGTGCCATTATTG |
| SEQ ID | GI 14518294 AF390905 Homo sapiens | TTGGCTTAATGCCTG |
| NO: 2708 | interleukin 19 | CCACGTGGTAAGGTC |
| | (IL19) gene, complete cds | TTGACATACACCTGT |
| | | CTATTCCCTGGGAAT |
| SEQ ID | GI 223718000 NG_009785 Homo sapiens | TCCAAAATGGGAACT |
| NO: 2709 | guanidinoacetate N-methyltransferase | AGTGGCCTGTGTTCT |
| | (GAMT), RefSeqGene on chromosome 19 | TTTTCTGGTGTGATT |
| | | CTTTGGCTCCACCCG |
| SEQ ID | GI 1027860277 NG_047185 Homo sapiens | CAGATGCACCTGACT |
| NO: 2710 | NLR family member XI | TGCTGCTATTAAAAA |
| | (NLRX1), RefSeqGene on chromosome 11 | GCCGTGTGCCTTCTA |
| | | CCAATTGTGGCCTCT |
| SEQ ID | GI 345091009 NG_029843 Homo sapiens | TGACCGGCGTGAGTG |
| NO: 2711 | nuclear receptor subfamily 1 | ATAGATGAAGTTAGA |
| | group H member 4 | GCTATGTTGGGATGG |
| | (NR1H4), RefSeqGene on chromosome 12 | GGTAGGATTCAGGGT |
| SEQ ID | GI 1024336776 NG_029865 Homo sapiens | GCCCATTGTCGAAGC |
| NO: 2712 | protein inhibitor of activated STAT 2 | CATAGTTGTGGAAGC |
| | (PIAS2), RefSeqGene on chromosome 18 | AGTCAAAGGTTGGAT |
| | | TTATTCAGGGTGGGT |
| SEQ ID | GI 170014713 NG_007461 Homo sapiens | GAGGCCTAGTGGGAG |
| NO: 2713 | transforming growth factor beta receptor 1 | AAGACTGATTCACTT |
| | (TGFBR1), RefSeqGene on chromosome 9 | GTTCTGGGTTTGAGC |
| | | CCTGTAAACTGCTGT |
| SEQ ID | GI 166064064 NM_002831 Homo sapiens | ATGAGAACCTGCACA |
| NO: 2714 | protein tyrosine phosphatase, | CTAAGAACAAGAGGG |
| | non-receptor type 6 | AGGAGAAAGTGAAGA |
| | (PTPN6), transcript variant 1, mRNA | AGCAGCGGTCAGCAG |
| SEQ ID | GI 28932927 AY245248 Homo sapiens | AGGTCTTTCGGACCC |
| NO: 2715 | BCL2-interacting killer | ATGAGACCCCGTGTC |
| | (apoptosis-inducing) | ATTGCTTTACCTCCC |
| | (BIK) gene, complete cds | TGAGTCTCAATTTTT |
| SEQ ID | GI 350606318 NG_009014 Homo sapiens | TGTCCTCACCACTTA |
| NO: 2716 | androgen receptor | AGTGGGTGTCAAATT |
| | (AR), RefSeqGene on chromosome X | TCCTTCCCTTTCTGC |
| | | ACACGCTGCACAATC |
| SEQ ID | GI 237820672 NG_012057 Homo sapiens | CTTTAGGACAGGAAG |
| NO: 2717 | carboxylesterase 1 | CCATGCATTAGACCG |
| | (CES1), RefSeqGene on chromosome 16 | CAGGAAGAACCCACT |
| | | GAAGTCAGGCTCTAC |
| SEQ ID | GI 226509828 NG_011801 Homo sapiens | ATTGTATGGAAGGAC |
| NO: 2718 | carnitine palmitoyltransferase 1A | CACAGTTTATCCACC |
| | (CPT1A), RefSeqGene on chromosome 11 | TGTTCATCCGCTGTT |
| | | GGGGACGTATCCAGG |
| SEQ ID | GI 1150763505 NG_052952 Homo sapiens | TGGGGTTGCTTTTAG |
| NO: 2719 | ezrin | ATGTTCCAGTGACTG |
| | (EZR), RefSeqGene on chromosome 6 | GGGACACTCAGTCAT |
| | | TGGATGGCTTAAGGA |
| SEQ ID | GI 224809239 NG_011444 Homo sapiens | GTTTCAAGCAGAGGA |
| NO: 2720 | fatty acid binding protein 2 | AACACCCTGGAGCAA |
| | (FABP2), RefSeqGene on chromosome 4 | AGACACCAAGGCAGT |
| | | AGCAAACCTGGTAAA |
| SEQ ID | GI 336285267 NG_029154 Homo sapiens | GAGCTACCACACCCC |
| NO: 2721 | interferon alpha 2 | AGAGGGTGGTATGGT |
| | (IFNA2), RefSeqGene on chromosome 9 | ATGTTGTCTGTTGTG |
| | | AGCTGTGTGAATCAG |
| SEQ ID | GI 1135449810 NG_052673 Homo sapiens | CTGAGACCATCCTGA |
| NO: 2722 | 0-6-methylguanine-DNA methyltransferase | TTGGGATTTGGTCAG |
| | (MGMT), RefSeqGene on chromosome 10 | TGGGAACTCAAGTCA |
| | | GTATTGTCCTGGGGG |
| SEQ ID | GI 237858724 NG_012101 Homo sapiens | CCACGGCTTCACTGG |
| NO: 2723 | matrix metallopeptidase 8 | GTATAATTCTGTGCT |
| | (MMP8), RefSeqGene on chromosome 11 | TAGCGGACGCTGTTC |
| | | CTTCTACTGGATCAC |
| SEQ ID | GI 226061859 NG_011749 Homo sapiens | TCCACAGTGCTCTGT |
| NO: 2724 | peroxisome proliferator | AATCAATTCCAGGAC |
| | activated receptor gamma | CGTGTGGATGGAGAC |
| | (PPARG), RefSeqGene on chromosome 3 [symbol] | CGGAAAGGTTTCTTT |
| SEQ ID | GI 356461041 NM_014329 Homo sapiens | GTGTGCTCATCAAGC |
| NO: 2725 | enhancer of mRNA decapping 4 | TCTTTTGTGTGCATA |
| | (EDC4), mRNA | CTAAGGCACTGCAAG |
| | | ATGTGCAGATCCGCT |
| SEQ ID | GI 115387093 NM_003000 Homo sapiens | CCACACCATCATGAA |
| NO: 2726 | succinate dehydrogenase | CTGCACAAGGACCTG |
| | complex iron sulfur subunit B | TCCTAAGGGTCTGAA |
| | (SDHB), mRNA | TCCAGGGAAAGCTAT |
| SEQ ID | GI 26000792 AY186092 Homo sapiens | ATTTTTTGCTCCTGC |
| NO: 2727 | interleukin-1 receptor- | GAGTCTTTTGCTCCC |
| | associated kinase 4 | AGGTAAACTGATTGT |
| | (IRAK4) gene, complete cds | GACCAGGGTGTCCAC |
| SEQ ID | GI 315360648 NG_028024 Homo sapiens | GGATATGTGTTTAGA |
| NO: 2728 | glucokinase regulator | GGTGAGGATGTGGCC |
| | (GCKR), RefSeqGene on chromosome 2 | CGGATGGAGAATACT |
| | | GAGAGCAGGGAGACT |
| SEQ ID | GI 238776809 NG_012246 Homo sapiens | GCAGTGGCAATGTCC |
| NO: 2729 | N-acetyltransferase 2 | CAGATTTCCCTGGAA |
| | (NAT2), RefSeqGene on chromosome 8 | GTTCAAACCAGGTGT |
| | | TCCACTGAACTTTCT |
| SEQ ID | GI 237874184 NG_012166 Homo sapiens | AGACCCATCACCACT |
| NO: 2730 | T-box 21 | CTCGGTTCCTTCCCA |
| | (TBX21), RefSeqGene on chromosome 17 | GCAAAGTGTCATGTA |
| | | AATCAGGGGCTATTT |
| SEQ ID | GI 378786656 NG_032107 Homo sapiens | TGTGAACTGAGAACC |
| NO: 2731 | TNF receptor superfamily member 10a | TCACTTCTCTGACCT |
| | (TNFRSF10A), RefSeqGene on chromosome 8 | CACCTTCCATCTCCC |
| | | TTAATCAGACGCCCA |
| SEQ ID | GI 238814313 NG_012262 Homo sapiens | TGCCTCATCTTCTGG |
| NO: 2732 | topoisomerase | CCAGGGATTGATCCT |
| | (DNA) 1 | GAGATGGGAAGAGTA |
| | (TOP1), RefSeqGene on chromosome 20 | TGAGAAGAGACACCA |
| SEQ ID | GI 974005372 NM_005944 Homo sapiens | CAGCGAGAACCATGG |
| NO: 2733 | CD200 molecule | GGTGGTGATCCAGCC |
| | (CD200), transcript variant 1, mRNA | TGCCTATAAGGACAA |
| | | GATAAACATTACCCA |
| SEQ ID | GI 57863305 NM_052872 Homo sapiens | AGCILGGAAAATLLL |
| NO: 2734 | interleukin 17F | LAAAGTAGGALATAC |
| | (IL17F), mRNA | TTTTTTCCAAAAGCC |
| | | IGAGAGTTGCCCGCC |
| SEQ ID | GI 149408158 NM_005259 Homo sapiens | CTCCGGGAACTGATT |
| NO: 2735 | myostatin | GATCAGTATGATGTC |
| | (MSTN), mRNA | CAGAGGGATGACAGC |
| | | AGCGATGGCTCTTTG |
| SEQ ID | GI 523498705 NM_024923 Homo sapiens | TAGCATCAGGGTCTA |
| NO: 2736 | nucleoporin 210 | TGATCGGGACATCCA |
| | (NUP210), mRNA | CCATCGAAGTGATTG |
| | | CACAAGAGCCCTTTG |
| SEQ ID | GI 156523967 NM_001618 Homo sapiens | TGACTATGGCCAGGA |
| NO: 2737 | poly(ADP-ribose) polymerase 1 | TGAAGAGGCAGTGAA |
| | (PARP1), mRNA | GAAGCTGACAGTAAA |
| | | TCCTGGCACCAAGTC |
| SEQ ID | GI 315630394 NM_002611 Homo sapiens | CTGATGACCAGGTTC |
| NO: 2738 | pyruvate dehydrogenase kinase 2 | TGTCTCTATGGAAGT |
| | (PDK2), transcript variant 1, mRNA | CACTGCGGTGATAGG |
| | | TCTGTGATGGTCCCT |
| SEQ ID | GI 88698227 DQ400449 Homo sapiens | AGTCTCCATGGCAAC |
| NO: 2739 | complement component 5 | CAGTCATCAAGGCTC |
| | (C5) gene, complete cds | CAGCAACCTTTTCAT |
| | | AGACACTCTCCACTC |
| SEQ ID | GI 40786798 AY518533 Homo sapiens | GTTCTTTTGATATTG |
| NO: 2740 | interleukin 17 receptor B | GACAATGCCCCCAGC |
| | (IL17RB) gene, complete cds | CACCCAGAGCCCCAT |
| | | GAGTTCAACACTAAA |
| SEQ ID | GI 589269250 NG_007475 Homo sapiens | AGCAGGTTGGTGGCA |
| NO: 2741 | aquaporin 1 | GAATTGGGATTTGAA |
| | (Colton blood group) | CCTATTCTGCTTGGC |
| | (AQP1), RefSeqGene on chromosome 7 | TTCAAAGATCAGGCT |
| SEQ ID | GI 259013220 NG_012921 Homo sapiens | CGCACGTCCAAGGAA |
| NO: 2742 | bisphosphoglycerate mutase | AAGCCAGGTACCAAA |
| | (BPGM), RefSeqGene on chromosome 7 | CTGAAACACTGGATG |
| | | TAGTCTGCATCTTGC |
| SEQ ID | GI 347800632 NG_030032 Homo sapiens | CTGCTGCTGCAATTT |
| NO: 2743 | HSPB1 associated protein 1 | CTACCTGCTCTAGGG |
| | (HSPBAP1), RefSeqGene on chromosome 3 | GTTTTGGACAGCTGT |
| | | TTTCTCTGGCAGTTC |
| SEQ ID | GI 1028908919 NG_050629 Homo sapiens | TGTGGGATTTTGTGT |
| NO: 2744 | neurotrophin 3 | TGGTGAGGACTGGAG |
| | (NTF3), RefSeqGene on chromosome 12 | TGTAGCTGGACTTAG |
| | | AGGGTTTGGTTGTGT |
| SEQ ID | GI 374349248 NG_032045 Homo sapiens | AACAGACAGACACTG |
| NO: 2745 | phospholipase A2 group V | GGTTAGAAACTTTTC |
| | (PLA2G5), RefSeqGene on chromosome 1 | GGTGCTTGCACGGGT |
| | | GGATTTCACTTTGCA |
| SEQ ID | GI 153082751 NM_002199 Homo sapiens | CATCCCGCTCTTTTC |
| NO: 2746 | interferon regulatory factor 2 | CTACTTTTCCTTCCC |
| | (IRF2), mRNA | TCAAAGCTTCCATTC |
| | | CACATCCGGAGGAGA |
| SEQ ID | GI 1036030581 AH008227 Homo sapiens | CCATAACCAATGTCA |
| NO: 2747 | chromosome 1 PEA15 protein | GCAACTCAGCTTTGG |
| | (PEA15) gene, complete cds | TTCCAGGTCACTAGT |
| | | CTGGTGGAGTAGGGG |
| SEQ ID | GI 153791376 NM_024310 Homo sapiens | GTCTCATGCCTTTTT |
| NO: 2748 | pleckstrin homology and | GTCCTGTCCTCAGCT |
| | FYVE domain containing 1 | CTCCGTGTGGTCAGC |
| | (PLEKHF1), mRNA | GAAACCATTGTTTTC |
| SEQ ID | GI 45243468 NM_002934 Homo sapiens | AGTTTACCTGGGCTC |
| NO: 2749 | ribonuclease A family member 2 | AATGGTTTGAAACCC |
| | (RNASE2), mRNA | AGCACATCAATATGA |
| | | CCTCCCAGCAATGCA |
| SEQ ID | GI 62003164 AY974245 Homo sapiens | AGTGAGATCACTGAT |
| NO: 2750 | alcohol dehydrogenase 4 | GGCAAGTTTGGACAA |
| | (class II), pi polypeptide | TTTCCCCATTTTTCC |
| | (ADH4) gene, complete cds | CAAGCTGACCAGGCT |
| SEQ ID | GI 1049010865 AH002678 Homo sapiens | AGTCTCTCTCTTATA |
| NO: 2751 | isolate Patient with P-450(C21) | AAGCCCTCCTTTTTC |
| | deficiency membrane protein | ATCCTAGCATTGGGA |
| | (CD3E) gene, complete cds | GCAATGGCCCCAGGG |
| SEQ ID | GI 2789671 AF040714 Homo sapiens | GCACAAGAAATGTCA |
| NO: 2752 | homeobox protein A10 | GCCAGAAAGGGCTAT |
| | (HOXA10) gene, complete cds | CTGCTCCCTTCGCCA |
| | | AATTATCCCACAACA |
| SEQ ID | GI 117606495 EF064722 Homo sapiens | CTTCTCAAGATCCGA |
| NO: 2753 | interleukin 6 signal transducer | GTCTACCCAGCCCTT |
| | (gpl30, oncostatin M receptor) | GTTAGATTCAGAGGA |
| | (II6ST) gene, complete cds | GCGGCCAGAAGATCT |
| SEQ ID | GI 1024846743 NG_047006 Homo sapiens | CAGCTGGGTGCATAG |
| NO: 2754 | hexokinase 3 | TGAGGGCTGGAGCAA |
| | (HK3), RefSeqGene on chromosome 5 | TGTTTTGGGAAGGAT |
| | | GACTGACTGAAAAAA |
| SEQ ID | GI 1028224162 NG_047195 Homo sapiens | GAACACCTTGGAACC |
| NO: 2755 | transducin beta | AGGGATCCCATAGTG |
| | like 1 X-linked receptor 1 | GAATCTCAGTGGGGC |
| | (TBL1XR1), RefSeqGene on chromosome 3 | TTATATTCCTGCTGG |
| SEQ ID | GI 371877908 NG_031992 Homo sapiens | ACTTGTATCAGGACC |
| NO: 2756 | Wnt family member 5A | ACATGCAGTACATCG |
| | (WNT5A), RefSeqGene on chromosome 3 | GAGAAGGCGCGAAGA |
| | | CAGGCATCAAAGAAT |
| SEQ ID | GI 125661056 NM_005195 Homo sapiens | GACATAGGAGCGCAA |
| NO: 2757 | CCAAT/enhancer binding protein delta | AGAAGCTACAGCCTG |
| | (CEBPD), mRNA | GACTTACCACCACTA |
| | | AACTGCGAGAGAAGC |
| SEQ ID | GI 82659110 NM_007172 Homo sapiens | AGGTCTTTTCCAAGC |
| NO: 2758 | nucleoporin 50 | AGGCACTCAGAACAC |
| | (NUP50), transcript variant 2, mRNA | AGGTCACCGTATGTT |
| | | CTCAGCCAGTAACAA |
| SEQ ID | GI 167234418 NM_005119 Homo sapiens | AGGCCCTATTATTTC |
| NO: 2759 | thyroid hormone receptor | CGTGGGCGTAACAGA |
| | associated protein 3 | GGCTTTTATCCATGG |
| | (THRAP3), mRNA | GGCCAATATAACCGA |
| SEQ ID | GI 81301989 DQ217942 Homo sapiens | TTTGTTGGGACAGGG |
| NO: 2760 | EGF-like module containing | TTAACTGTAAGGTCA |
| | mucin-like hormone receptor-like 1 | GGACTCTGAGACAAG |
| | (EMR1) gene, complete cds | CGCTGACTCCTCCTA |
| SEQ ID | GI 300116194 NG_023256 Homo sapiens | ACGTGAGCTCTCTGG |
| NO: 2761 | linker for activation of | CCTCAGTTTCTCGAT |
| | T-cells family member 2 | TTGTGAAATGCAGTG |
| | (LAT2), RefSeqGene on chromosome 7 | AACCTCGTCCTCAAA |
| SEQ ID | GI 238814317 NG_012266 Homo sapiens | GGGACGGAGGGTTGA |
| NO: 2762 | X-box binding protein 1 | TGTCATAGCAAGATT |
| | (XBP1), RefSeqGene on chromosome 22 | GCAGCCTTCACTAGA |
| | | TTAATGAGGCCAGGT |
| SEQ ID | GI 229608964 NM_014600 Homo sapiens | TTTTGCAGTTGAGGA |
| NO: 2763 | EH domain containing 3 | GGCTGAGTAGCCTCA |
| | (EHD3), mRNA | GAAGGGTTTAGGCGA |
| | | CCTTCTGAAACTCAC |
| SEQ ID | GI 213972644 NM_002748 Homo sapiens | TTTACATTGTTCAGG |
| NO: 2764 | mitogen-activated protein kinase 6 | AGTACATGGAGACAG |
| | (MAPK6), mRNA | ACTTGGCTAATGTGC |
| | | TGGAGCAGGGCCCTT |
| SEQ ID | GI 1147566 X80590 H. sapiens | CTAGGGGGCAGGTGG |
| NO: 2765 | PHKGI mRNA | GGAGGGGAAGCCATG |
| | | GAAATACAAGTCAAA |
| | | GGGGTAAAAAAAAAA |
| SEQ ID | GI 1049010946 AH002554 Homo sapiens | ATAGAATCCTGTGAA |
| NO: 2766 | actin prepeptide | GCAGCTCCAGCTATG |
| | (ACTA2) gene, complete cds | TGTGAAGAAGAGGAC |
| | | AGCACTGCCTTGGTG |
| SEQ ID | GI 255652911 NG_012637 Homo sapiens | TCAGCTGAGCTAAGG |
| NO: 2767 | C-C motif chemokine receptor 5 | GGCTCCCACCAGGTT |
| | (gene/pseudogene) | TGAGCCTATCTAATG |
| | (CCR5), RefSeqGene on chromosome 3 | AATCCATGAGGTAGA |
| SEQ ID | GI 255652920 NG_012644 Homo sapiens | GTGAGACCCAGAAGA |
| NO: 2768 | deleted in malignant brain tumors 1 | CTGTGGCCAAAGCTA |
| | (DMBT1), RefSeqGene on chromosome 10 | TTATGGACCCATGGT |
| | | CTCCGTGGAATCATC |
| SEQ ID | GI 336285218 NG_029143 Homo sapiens | TTGATGGAGGACTTT |
| NO: 2769 | mitogen-activated protein kinase kinase 5 | GAGGTGAGCTTCATG |
| | (MAP2K5), RefSeqGene on chromosome 15 | GAGACAATGGTGGCA |
| | | TTCAAGCTGGGTCTA |
| SEQ ID | GI 1024357482 NG_046924 Homo sapiens | CCTTAGGCCGTCCAG |
| NO: 2770 | NLR family pyrin domain containing 5 | TCATCTTTCTCTGGG |
| | (NLRP5), RefSeqGene on chromosome 19 | GCTTGATTGATCAGT |
| | | TCCCACTCTGACAAC |
| SEQ ID | GI 1147592400 NG_029037 Homo sapiens | AGATTCCACCACCAA |
| NO: 2771 | reticulon 4 | ACCTCTGTGACCACA |
| | (RTN4), RefSeqGene on chromosome 2 | ACCTCCTCTATGTTC |
| | | ACTACAGCCACTTGC |
| SEQ ID | GI 257467583 NG_012852 Homo sapiens | ACCCCCGAGCAGATC |
| NO: 2772 | signal transducer and activator | TTTACCAGGCCTGTA |
| | of transcription 4 | CATGGATCCCCAACT |
| | (STAT4), RefSeqGene on chromosome 2 | GTTTTGAGTATTGAC |
| SEQ ID | GI 674651085 NG_012882 Homo sapiens | CCTAGTTCTGCCTGC |
| NO: 2773 | toll like receptor 8 | AATGGCACCAGCTCA |
| | (TLR8), RefSeqGene on chromosome X | ACCACCTGGTACATA |
| | | AGACACAAAAGCAAG |
| SEQ ID | GI 51479142 NM_001003703 Homo sapiens | CTCAAAGAGCGCATG |
| NO: 2774 | ATP synthase, H+ transporting, | CGTACAGAGCAAGGT |
| | mitochondrial Fo complex subunit F6 | TTCAAGGAGGGGAAA |
| | (ATP5J), transcript [symbol] | AAGAACGGGTCAAAT |
| SEQ ID | GI 31343534 NM_178818 Homo sapiens | CCTGCACATGAGGAT |
| NO: 2775 | CKLF like MARVEL transmembrane domain containing 4 | CCCCCAGATCAACTG |
| | (CMTM4), transcript variant 1, mRNA [symbol] | GAATCTGACAGATTT |
| | | GGTCAACACTGGACT |
| SEQ ID | GI 695917236 NM_021010 Homo sapiens | GAAATGGACTCTCTG |
| NO: 2776 | defensin alpha 5 | CTCTTAGAACCTCAG |
| | (DEFA5), mRNA | GTTCTCAGGCAAGAG |
| | | CCACCTGCTATTGCC |
| SEQ ID | GI 590122055 NM_021649 Homo sapiens | AGGGATGGGGTGGAG |
| NO: 2777 | toll like receptor adaptor molecule 2 | AATGGGTCATGTCAT |
| | (TICAM2), mRNA | GTAATGAGAAAAGCC |
| | | CTCTTCGGGATCATG |
| SEQ ID | GI 315365062 HQ384162 Homo sapiens | CCTAAGCTGAGAGTT |
| NO: 2778 | cell death-inducing DFFA-like effector a | CGGTTTTCAGAGATC |
| | (CIDEA) gene, complete cds | TGGGGGAGTAGCATC |
| | | AATGGAGGGGTTTGC |
| SEQ ID | GI 10799005 AF261108 Homo sapiens | GGCATCTCCTACTAC |
| NO: 2779 | type XV collagen | CTGAGCTGTTTTAGG |
| | (COL15A1) gene, promoter sequence and exon 1, | CAGGGAACAAAGCAC |
| | | AGATAAGCCCTCCTG |
| SEQ ID | GI 117606543 EF064746 Homo sapiens | TCAGGTAGCTCCGAG |
| NO: 2780 | complement component | TGGGGAGATGACCAA |
| | (3d/Epstein Barr virus) receptor 2 | GTCATGCCACCTAAA |
| | (CR2) gene, complete cds | ACATGTCACCAAAAA |
| SEQ ID | GI 57864635 AY882422 Homo sapiens | CAGGACACTTGCTGC |
| NO: 2781 | flavin containing monooxygenase 4 | CACCTCTTACCTGGT |
| | (FMO4) gene, complete cds | CTCCCTCCTTCCACT |
| | | CTGTTCTACAATCTA |
| SEQ ID | GI 342187237 NG_029217 Homo sapiens | CTCACTGTGCTGAAG |
| NO: 2782 | major histocompatibility complex, class 1, A | CCCAAAGGGAAACAT |
| | (HLA-A), RefSeqGene on chromosome 6 | CCCTCATCCAAGCCA |
| | | AACCAGAAGCAATAT |
| SEQ ID | GI 1147623323 NG_029437 Homo sapiens | TCCTTTGCAGTCTCT |
| NO: 2783 | mitogen-activated protein kinase kinase 6 | CCATGTCTGCATCAC |
| | (MAP2K6), RefSeqGene on chromosome 17 | TGGGGACTGATTCTG |
| | | AGGTTTCAGTGGTTG |
| SEQ ID | GI 270483830 NG_016181 Homo sapiens | CTACACGGGAAAGCT |
| NO: 2784 | sphingosine-1-phosphate receptor 1 | GAATATCAGCGCGGA |
| | (SIPR1), RefSeqGene on chromosome 1 | CAAGGAGAACAGCAT |
| | | TAAACTGACCTCGGT |
| SEQ ID | GI 40794510 AY497547 Homo sapiens | AGATGAAGAAGACAG |
| NO: 2785 | chemokine-like receptor 1 | TGAACATGGTCTGGT |
| | (CMKLR1) mRNA, complete cds | TCCTCAACCTGGCAG |
| | | TGGCAGATTTCCTGT |
| SEQ ID | GI 10798850 AF084559 Homo sapiens | TTCCTCAACTTCATC |
| NO: 2786 | fatty acid desaturase 2 | AGGTTCCTGGAGAGC |
| | (FADS2) mRNA, complete cds | CACTGGTTTGTGTGG |
| | | GTCACACAGATGAAT |
| SEQ ID | GI 209413750 NM_006038 Homo sapiens | CTCAACCAATGGCTG |
| NO: 2787 | spermatogenesis associated 2 | CTTTGTTGTCTGACA |
| | (SPATA2), transcript variant 1, mRNA | AGGGAGAAGGTGGCA |
| | | CTTCCGTTCAGATTC |
| SEQ ID | GI 46091142 AB110934 Homo sapiens | TTCTATGCTCCATAC |
| NO: 2788 | MRPS18B gene for MRPS18B protein, | ACAGGTTAGCCCATC |
| | complete cds, cell_line: LKT3 | ATCCCTGCACCACCA |
| | | GAGAGCTTTTCCTTG |
| SEQ ID | GI 5821735 AF155233 Homo sapiens | CAGGAATGCATATGG |
| NO: 2789 | snail zinc finger protein | GAAGCACCTGGCAAA |
| | (SNAIl) gene, complete cds | GTGCCGGTACCTGCT |
| | | AAACTCTCACAAAAA |
| SEQ ID | GI 212549702 NG_008951 Homo sapiens | CACTGTCAACTGCAG |
| NO: 2790 | ATR serine/threonine kinase | CCCAGCAGGAAGGAA |
| | (ATR), RefSeqGene on chromosome 3 | ACGAGCAGGTATAAA |
| | | GACCTTAACCTCACT |
| SEQ ID | GI 237858602 NG_012146 Homo sapiens | TGCCTAAGTCCAGCC |
| NO: 2791 | period circadian clock 2 | AAGGTTTAAGGAGAA |
| | (PER2), RefSeqGene on chromosome 2 | AGGAATTAGGCCCCA |
| | | CCTTTTGAGGAAGGA |
| SEQ ID | GI 237858805 NG_012139 Homo sapiens | CCAACTTCTTGCCCT |
| NO: 2792 | uncoupling protein 1 | ACCTCTCTCTTTCTT |
| | (UCP1), RefSeqGene on chromosome 4 | CCCCATCACCCAATT |
| | | TCCCAGTCAGTCAGG |
| SEQ ID | GI 75709215 NM_181866 Homo sapiens | TGCAGGTCAACGTGA |
| NO: 2793 | acyl-CoA thioesterase 7 | TGTCCGAAAACATCC |
| | (ACOT7), transcript variant hBACHd, mRNA | TCACAGGTGCCAAAA |
| | | AGCTGACCAATAAGG |
| SEQ ID | GI 927028873 NM_004836 Homo sapiens | TCTACAGCGTACCCA |
| NO: 2794 | eukaryotic translation initiation | AAAAACTGTTAGAGC |
| | factor 2 alpha kinase 3 | TGTCGGACCTCGCAG |
| | (EIF2AK3), transcript variant 1, mRN [symbol] | TGGCAATGAGAAGTG |
| SEQ ID | GI 261337164 NM_206943 Homo sapiens | GTACTTTCCAGCCCA |
| NO: 2795 | latent transforming growth | GAAGGGGATTTCAGG |
| | factor beta binding protein 1 | AGAGCAGTCCACTGA |
| | (LTBP1), transcript variant 1, mRN [symbol] | AGGTTCTTTCCCTTT |
| SEQ ID | GI 523498705 NM_024923 Homo sapiens | GAAAACATCCTTCTG |
| NO: 2796 | nucleoporin 210 | AACCCGGCCTATGAC |
| | (NUP210), mRNA | GTCTACCTGATGGTG |
| | | GGAACCTCCATTCAC |
| SEQ ID | GI 209862906 NM_006475 Homo sapiens | AGAGACGGTCACTTC |
| NO: 2797 | periostin | ACACTCTTTGCTCCC |
| | (POSTN), transcript variant 1, mRNA | ACCAATGAGGCTTTT |
| | | GAGAAACTTCCACGA |
| SEQ ID | GI 324072795 NM_005402 Homo sapiens | TTGTGTTTCTTGGGC |
| NO: 2798 | RAS like proto-oncogene A | AGTCTTTCTTGAAAT |
| | (RALA), mRNA | TGAAGAGGTGAAATG |
| | | GGGGTGGGGAGTGGG |
| SEQ ID | GI 984290537 NM_001319196 Homo sapiens | TAAAAAGGAGCTGCC |
| NO: 2799 | S100 calcium binding protein A8 | TCTCAGCCCTGCATG |
| | (S100A8), transcript variant 1, mRNA | TCTCTTGTCAGCTGT |
| | | CTTTCAGAAGACCTG |
| SEQ ID | GI 1220516002 NM_023003 Homo sapiens | TGTTGGTTGTGTGTC |
| NO: 2800 | transmembrane 6 superfamily member 1 | TCCTCCTGGCAACTG |
| | (TM6SF1), transcript variant 1, mRNA | GATTTTGCCTGTTCA |
| | | GAGGTTTGATTGCTT |
| SEQ ID | GI 117606573 EF064761 Homo sapiens | AAAGAGTGAATATGT |
| NO: 2801 | chemokine | GTCGCATCCAGAGAG |
| | (C-C motif) ligand 28 | CTGATGGGGATTGTG |
| | (CCL28) gene, complete cds | ACTTGGCTGCTGTCA |
| SEQ ID | GI 189217848 NG_007931 Homo sapiens | GGAGCAAGGTGGTGG |
| NO: 2802 | cytochrome P450 family 2 | GATAAGACTGAATCC |
| | subfamily J member 2 | ACTGTATTTGCTCCG |
| | (CYP2J2), RefSeqGene on chromosome 1 | ATGGGGACCATTAGG |
| SEQ ID | GI 1028224151 NG_008493 Homo sapiens | GGAAGGTCTCCATGG |
| NO: 2803 | estrogen receptor 1 | AGAAGGTGTGCTTTG |
| | (ESR1), RefSeqGene on chromosome 6 | AGATGAACACTGAGG |
| | | AAGTGGTGGGATCAC |
| SEQ ID | GI 1003701615 NG_008076 Homo sapiens | CGGACACTCCTCTTG |
| NO: 2804 | growth differentiation factor 5 | CTGATGCCACCATCT |
| | (GDF5), RefSeqGene on chromosome 20 | GGTTGAATTGTGTCA |
| | | ATCTCCCTAGTTGGA |
| SEQ ID | GI 160358379 NG_007100 Homo sapiens | TATCCTCAAATGCAA |
| NO: 2805 | methylmalonyl-CoA mutase | ACTGCGGAGTCTGCC |
| | (MUT), RefSeqGene on chromosome 6 | ACAAACGCGTTGGCT |
| | | TTAAAACTCATCCCT |
| SEQ ID | GI 237858758 NG_012120 Homo sapiens | GAACAGAGCATGCAA |
| NO: 2806 | RAD51 recombinase | TCCATCCCCATGATC |
| | (RAD51), RefSeqGene on chromosome 15 | TTACCCTGGGAGCTT |
| | | GTCCACTATCCTGTT |
| SEQ ID | GI 257153311 NG_012800 Homo sapiens | AAGGGAGCCCAGAAA |
| NO: 2807 | regulator of G protein signaling 2 | TGGAGGACATTTCAT |
| | (RGS2), RefSeqGene on chromosome 1 | TCTTTTTCCTGAGGG |
| | | GAAGGACTGTGACCT |
| SEQ ID | GI 1018443413 NG_027814 Homo sapiens | GTGCGAGCTGTTACG |
| NO: 2808 | SATB homeobox 1 | CTGGAAAGAAGATCC |
| | (SATB1), RefSeqGene on chromosome 3 | TTCTCCAGAAAACAG |
| | | AACCCTGTGGGAGAA |
| SEQ ID | GI 340523103 NG_029468 Homo sapiens | GCAGGGGCTGTTGTA |
| NO: 2809 | SWI/SNF related, matrix associated, | GAATCCCTCTCAACT |
| | actin dependent regulator of | TGTCTGTGTCTTAAA |
| | chromatin, subfamily d, m [symbol] | CCCGGAGTACCAACC |
| SEQ ID | GI 81230486 NM_001037162 Homo sapiens | GGACATGGTTTTGCT |
| NO: 2810 | acyl-CoA thioesterase 6 | GTGCTTGCCCTGGCT |
| | (ACOT6), mRNA | TATTTCAGATTTGAA |
| | | GACCTCCCCGAAGAT |
| SEQ ID | GI 38505219 NM_017888 Homo sapiens | CCACTCAGCCCTGCT |
| NO: 2811 | acyl-CoA synthetase medium | CTGCTCAGCTGAAGC |
| | chain family member 5 | AGAAAACAGAGACCT |
| | (ACSM5), transcript variant 1, mRNA | TTTGCATTACTTTGG |
| SEQ ID | GI 114731556 DQ866809 Homo sapiens | TGTAATCTCAAAGAA |
| NO: 2812 | endoglin | CAGGAGACCTGAGGG |
| | (Osler-Rendu-Weber syndrome 1) | AAGAGAGGCGGACAA |
| | (ENG) gene, complete cds | AGGACACACACTCCT |
| SEQ ID | GI 300116187 NG_023252 Homo sapiens | GTCCTTCTCAAAACA |
| NO: 2813 | interleukin 4 | CCTAAACTTGGGAGA |
| | (IL4), RefSeqGene on chromosome 5 | ACATTGTCCCCCAGT |
| | | GCTGGGGTAGGAGAG |
| SEQ ID | GI 340805855 NG_029505 Homo sapiens | TAGGGGATCAGAATG |
| NO: 2814 | methyl-CpG binding domain protein 1 | GTGACAGTTAGGGAT |
| | (MBD1), RefSeqGene on chromosome 18 | GGCATGATCCCGGGA |
| | | CAAGAACAGAGAGAA |
| SEQ ID | GI 353409895 NG_030365 Homo sapiens | TCCAGGGAACTGTGG |
| NO: 2815 | POU class 2 homeobox 2 | TCTTACATGGGGGAT |
| | (POU2F2), RefSeqGene on chromosome 19 | ACAAGCACCCCTAGA |
| | | TACACACCGACATAG |
| SEQ ID | GI 343488503 NG_029728 Homo sapiens | CCACATCTCTTCCAC |
| NO: 2816 | protein kinase cAMP-activated | CTTCTAGAGGCCACC |
| | catalytic subunit beta | TGCTTTCCTTGACTC |
| | (PRKACB), RefSeqGene on chromosom [symbol] | ATGATGCCATTCCTC |
| SEQ ID | GI 393662586 NM_002754 Homo sapiens | TCAAGCAGAGGACAG |
| NO: 2817 | mitogen-activated protein kinase 13 | AAGGGTCCTTCTCCT |
| | (MAPK13), transcript variant 1, mRNA | TATGTGGGAAATGGG |
| | | CCTAGTAGATGCAGA |
| SEQ ID | GI 53759150 NM_005063 Homo sapiens | GGGGCCTGAGTGGAG |
| NO: 2818 | stearoyl-CoA desaturase | GATTATCAGTATCAC |
| | (SCD), mRNA | GATTTGCAGGATTCC |
| | | CTTCTGGGCTTCATT |
| SEQ ID | GI 543173138 NM_018202 Homo sapiens | AACTGGTGGGTAGCT |
| NO: 2819 | transmembrane protein 57 | GGGCTGTCCGTTACC |
| | (TMEM57), transcript variant 1, mRNA | ACCACAGCTACATCT |
| | | TCTGTTTCTTTGAAT |
| SEQ ID | GI 226509596 NG_011798 Homo sapiens | TTGGACAGGCATAGC |
| NO: 2820 | ATP binding cassette subfamily C member 2 | TGCTTGGAGATGTCT |
| | (ABCC2), RefSeqGene on chromosome 10 | CTCAGCAGCAGCTGG |
| | | GTCTTTCTTTTTACT |
| SEQ ID | GI 341865533 NG_029560 Homo sapiens | CACAGCGGAATTTCT |
| NO: 2821 | aquaporin 4 | GGCCATGCTTATTTT |
| | (AQP4), RefSeqGene on chromosome 18 | TGTTCTCCTCAGCCT |
| | | GGGATCCACCATCAA |
| SEQ ID | GI 197209823 NG_008387 Homo sapiens | AAACGTATGTTGCAA |
| NO: 2822 | interleukin 1 receptor | TCTCGGGCTCTACTT |
| | associated kinase 1 | GTGGACTTTGTTGCA |
| | (IRAK1), RefSeqGene on chromosome X | CCGAAAGCCTTGAGC |
| SEQ ID | GI 194353939 NG_008255 Homo sapiens | ATGCCTTCTCGCTAT |
| NO: 2823 | solute carrier family 19 member 2 | GCTGCTATCTATAAT |
| | (SLC19A2), RefSeqGene on chromosome 1 | GGTGGCGTGGAGGCC |
| | | GTTTCAACCTTACTG |
| SEQ ID | GI 336455046 NG_029166 Homo sapiens | AAGAAGGATTAGCAG |
| NO: 2824 | SRY-box 4 | CCAGGTCTACTATGA |
| | (SOX4), RefSeqGene on chromosome 6 | ATCCGGAGGCCCCAT |
| | | TCTCTTCTGCTACCA |
| SEQ ID | GI 156523973 NM_001296 Homo sapiens | GACCAAATTTTGGTC |
| NO: 2825 | atypical chemokine receptor 2 | TGGTGGGAACAGATG |
| | (ACKR2), mRNA | GGAACCAGCTCAATT |
| | | GGGTGTCCACTCAAA |
| SEQ ID | GI 1084352529 NM_000755 Homo sapiens | GGGTCAGCTCCGATT |
| NO: 2826 | carnitine O-acetyltransferase | TGCTGCCAAACTCAT |
| | (CRAT), transcript variant 1, mRNA | TGAGGGTGTGTTGGA |
| | | TTTCAAGGTCATGAT |
| SEQ ID | GI 394582046 NM_003877 Homo sapiens | AAAAGTAGGTCACAT |
| NO: 2827 | suppressor of cytokine signaling 2 | TTCAAGTAGGTCATA |
| | (SOCS2), transcript variant 1, mRNA | TTTCGGGGGCGGGTG |
| | | CGCAGACAAGGAGAT |
| SEQ ID | GI 523425747 NM_004599 Homo sapiens | AGCTATAGAGTCCTT |
| NO: 2828 | sterol regulatory element | GGTGAAACCTCAGGC |
| | binding transcription factor 2 | CAAGAAGAAGGCTGG |
| | (SREBF2), transcript variant 1, mRN [symbol] | AGACCAGGAAGAAGA |
| SEQ ID | GI 15021772 AF400075 Homo sapiens | ACTGCCTCATAGAAA |
| NO: 2829 | coagulation factor II | CGAACTCAGCCGAGA |
| | (thrombin) receptor-like 1 | TCACAACCTTCTCAG |
| | (F2RL1) gene, complete cds | GGTACAGGTGAAGGA |
| SEQ ID | GI 182739 L10820 Human | CACCTTTCGGATCAG |
| NO: 2830 | N-formyl peptide receptor | TGATGAGTCTCCACG |
| | (FPR1) gene, complete cds and Alu repeats | TGAAGACACTGGTTC |
| | | TGCATGGTGCATAGG |
| SEQ ID | GI 300069049 NG_023225 Homo sapiens | GTGGGCCTACTGTCT |
| NO: 2831 | acetyl-CoA acyltransferase 1 | TCCCTGATATGGTCA |
| | (ACAA1), RefSeqGene on chromosome 3 | TTCTGTCTCCTTGAA |
| | | GTGCTAGCCCTACCT |
| SEQ ID | GI 974987497 NG_011800 Homo sapiens | GCTCTAAGAACAGCA |
| NO: 2832 | ceruloplasmin | AAAGGATGGATGGAG |
| | (CP), RefSeqGene on chromosome 3 | CAGGGTGAGCAGAAG |
| | | GTGTGGAAAGCTAGA |
| SEQ ID | GI 339409221 NG_029376 Homo sapiens | ACATTCTTACAAGCA |
| NO: 2833 | interleukin 17 receptor C | ATGCCTCCAAAAGCA |
| | (IL17RC), RefSeqGene on chromosome 3 | AAGGAGGATGGGGCA |
| | | ATCTCCTTGATCCCC |
| SEQ ID | GI 19072753 AF475085 Homo sapiens | TACTTCTTGGGACTT |
| NO: 2834 | mucolipin-3 | CTACCATGCTCGTGT |
| | (MCOLN3) mRNA, complete cds | GGCTTGGAGTCATCC |
| | | GATACCTCGGTTTCT |
| SEQ ID | GI 327412387 NG_028268 Homo sapiens | TGTTGATGCCAAGGC |
| NO: 2835 | ATP binding cassette subfamily C member 1 | TGAAGAAGACTGGAT |
| | (ABCC1), RefSeqGene on chromosome 16 | TTGCAGGCAAAAGAC |
| | | TGTCATTTGAGGCCT |
| SEQ ID | GI 532691848 NG_009095 Homo sapiens | TCATTGGCTCCATCA |
| NO: 2836 | calcium voltage-gated | CCTCCATTGGGTACT |
| | channel subunit alphal F | ACATGGTTCTGTCAC |
| | (CACNA1F), RefSeqGene on chromosome X | CTCAACTGACAACGC |
| SEQ ID | GI 190358505 NG_008040 Homo sapiens | AGTAACAGACAGATG |
| NO: 2837 | colony stimulating factor 2 | GATGTCCCGAGGCTT |
| | receptor beta common subunit | GGGGAAGTAACACGC |
| | (CSF2RB), RefSeqGene on chrome [symbol] | AGATGATTTGCACAA |
| SEQ ID | GI 291045457 NG_016717 Homo sapiens | TACATCATCCAGAGC |
| NO: 2838 | phosphoribosyl pyrophosphate synthetase 2 | GGCTGCGGGGAAATT |
| | (PRPS2), RefSeqGene on chromosome X | AACGACAACCTGATG |
| | | GAACTCCTCATCATG |
| SEQ ID | GI 226246635 NG_011759 Homo sapiens | ACACATTCAGACCCC |
| NO: 2839 | transporter 1, ATP binding | AGATCCTCCTCCACA |
| | cassette subfamily B member | AATTCAGAGACCCAA |
| | (TAP1), RefSeqGene on chromoso [symbol] | GCACCCACCAAATAG |
| SEQ ID | GI 756140821 NM_014358 Homo sapiens | TGGACTGTTGCTGGG |
| NO: 2840 | C-type lectin domain family 4 member E | ATCCCCATCCTATTT |
| | (CLEC4E), mRNA | CTCAGTGCCTGTTTC |
| | | ATCACCAGATGTGTT |
| SEQ ID | GI 815890844 NM_001836 Homo sapiens | TAAGACGGAACTTTG |
| NO: 2841 | chymase 1 | TGCTGACGGCTGCTC |
| | (CMAl), transcript variant 1, mRNA | ATTGTGCAGGAAGGT |
| | | CTATAACAGTCACCC |
| SEQ ID | GI 209915567 NM_018438 Homo sapiens | CCTGCGCAACCCGTG |
| NO: 2842 | F-box protein 6 | TGCTGAAGAGGATAT |
| | (FBX06), mRNA | GTTTGCATGGCAAAT |
| | | TGATTTCAATGGTGG |
| SEQ ID | GI 260166681 NM_138387 Homo sapiens | CACCGAGTGGCTCAA |
| NO: 2843 | glucose-6-phosphatase | CCTCATCTTCAAGTG |
| | catalytic subunit 3 | GTTTCTTTTTGGAGA |
| | (G6PC3), transcript variant 1, mRNA | CAGGCCCTTTTGGTG |
| SEQ ID | GI 225579056 NM_003049 Homo sapiens | GTGTTCATGTTGTTC |
| NO: 2844 | solute carrier family 10 member 1 | TTCATCATGCTCTCG |
| | (SLC10A1), mRNA | CTGGGCTGCACCATG |
| | | GAGTTCAGCAAGATC |
| SEQ ID | GI 115432768 DQ995342 Homo sapiens | GTCTGAACGATTTTA |
| NO: 2845 | ADAM metallopeptidase domain 33 | AACCATTGGCTACAC |
| | (ADAM33) gene, complete cds | CCCTGCCCCTCCTAG |
| | | AGAGCCCTCTTTGTT |
| SEQ ID | GI 66841738 DQ075211 Homo sapiens | AGGGGACCCACCTGA |
| NO: 2846 | c-src tyrosine kinase | GGTCCCACAGATATA |
| | (CSK) gene, complete cds | ATTTGGTGCCAGGAC |
| | | TAGAATCTGAGTCTG |
| SEQ ID | GI 18653447 AF478696 Homo sapiens | AACTAGTGGGTTCAG |
| NO: 2847 | coagulation factor II | GAGCTCGAGCTAGAA |
| | (thrombin) | GTGGTGAGAAGGGTT |
| | (F2) gene, complete cds | TGGATTTGGGGTCTA |
| SEQ ID | GI 54781374 AY795972 Homo sapiens | AGCACAGTTGTATAT |
| NO: 2848 | matrix metalloproteinase 7 | AGAGTGGCCACTAAT |
| | (matrilysin, uterine) | CCAGCCACACAGCAG |
| | (MMP7) gene, complete cds | CATTTCCATCTGCCT |
| SEQ ID | GI 571026712 NG_033872 Homo sapiens | TCTTCTAGGCAGCCA |
| NO: 2849 | cytochrome cl | TCAGACACGTTCAAT |
| | (CYC1), RefSeqGene on chromosome 8 | AACGGAGGTTCTGTG |
| | | CGAATGAGGGCATTT |
| SEQ ID | GI 299829203 NG_023197 Homo sapiens | TTTCTGACAGCATGA |
| NO: 2850 | parathyroid hormone like hormone | TTGGAAACGCAGGCC |
| | (PTHLH), RefSeqGene on chromosome 12 | CTTTTCCTTTCCGCA |
| | | CATATGGGCTAAGTC |
| SEQ ID | GI 237858758 NG_012120 Homo sapiens | TCCCTGTCTTCCTGA |
| NO: 2851 | RAD51 recombinase | AGCTGAAGCTATGTT |
| | (RAD51), RefSeqGene on chromosome 15 | CGCCATTAATGCAGA |
| | | TGGAGTGGGAGATGC |
| SEQ ID | GI 1024846748 NG_046980 Homo sapiens | TCCCCCGCATCCTTT |
| NO: 2852 | synaptonemal complex protein 2 | AATCCCTTCAGTATG |
| | (SYCP2), RefSeqGene on chromosome 20 | CCACCTTGCAAAATC |
| | | TCCAAGCCTAGGTAA |
| SEQ ID | GI 692314725 NM_002416 Homo sapiens | CGGTGAAGTACTAAG |
| NO: 2853 | C-X-C motif chemokine ligand 9 | CGCTAGAGGAAGCAG |
| | (CXCL9), mRNA | CCAAGTCGGTTAGTG |
| | | GAAGCATGATTGGTG |
| SEQ ID | GI 31317227 NM_004430 Homo sapiens | TGCTCTCTGCCACAG |
| NO: 2854 | early growth response 3 | CTTGCAGCATGGTCT |
| | (EGR3), transcript variant 1, mRNA | TGACTGAATGTACTG |
| | | TTCCTGTTAGCGTTA |
| SEQ ID | GI 238018064 NG_012194 Homo sapiens | GCCCTTCTCTTTCCC |
| NO: 2855 | cytochrome b5 reductase 3 | AAGACAGTAATCCTA |
| | (CYB5R3), RefSeqGene on chromosome 22 | GAGAGTGCAGGGCAG |
| | | GAAGTAGTCCCAAGA |
| SEQ ID | GI 1172222469 NG_053051 Homo sapiens | AGGCGGATTGTTGTT |
| NO: 2856 | heat shock protein family H | AGCGACCACGGAAGC |
| | (HspllO) member 1 | AGTCCTATGAAAGAT |
| | (HSPH1), RefSeqGene on chromosome 13 | TAGCCCACCTCTTTT |
| SEQ ID | GI 224809341 NG_011508 Homo sapiens | TTGATCAGGTCAGCA |
| NO: 2857 | insulin like growth factor | ATGTGCACCTATGTG |
| | binding protein 3 | ACTGGTCCTTGCCTT |
| | (IGFBP3), RefSeqGene on chromosome 7 | TTTTGGGTTGTGTCC |
| SEQ ID | GI 209447063 NG_008722 Homo sapiens | ACATTTGAATTGAGC |
| NO: 2858 | lysyl oxidase | CTTGAAGTCTGGGGA |
| | (LOX), RefSeqGene on chromosome 5 | ATGCACCGGGGAGCA |
| | | TTAAGGAAAGGAAGC |
| SEQ ID | GI 601984942 NG_034078 Homo sapiens | TGGGGTCCTGACTAG |
| NO: 2859 | myelin associated glycoprotein | GTGGTTTTCACCCAA |
| | (MAG), RefSeqGene on chromosome 19 | AAAGGTATTAGGGGT |
| | | TACATTGTGTGCCCT |
| SEQ ID | GI 1147399622 NG_012448 Homo sapiens | AGCATGTTTAAACAG |
| NO: 2860 | nodal growth differentiation factor | GGACCACCTACACAC |
| | (NODAL), RefSeqGene on chromosome 10 | TAGGCCACATGGTGA |
| | | TTTGGTAGACCTGGG |
| SEQ ID | GI 237858771 NG_012125 Homo sapiens | GACCTTCAGGACAAT |
| NO: 2861 | selectin P | GGACAGCAGTAACTC |
| | (SELP), RefSeqGene on chromosome 1 | CAGCATGCAGAGGTA |
| | | AGGTGAAAAGGAGCA |
| SEQ ID | GI 257467583 NG_012852 Homo sapiens | TCACTTCTATTTCAC |
| NO: 2862 | signal transducer and | TACGCCACTGCTCAA |
| | activator of transcription 4 | AAACCTGCAGTTACC |
| | (STAT4), RefSeqGene on chromosome 2 | CCCAGTCACGCTTCA |
| SEQ ID | GI 38708325 NM_001896 Homo sapiens | CGAATGTAAAAGGCT |
| NO: 2863 | casein kinase 2 alpha 2 | CACTTGCCTTTGGCT |
| | (CSNK2A2), mRNA | TCCTGTTGACTTCTT |
| | | CCCGACCCAGAAAGC |
| SEQ ID | GI 735661405 NM_002201 Homo sapiens | TCCGCCCCTGACTTC |
| NO: 2864 | interferon stimulated exonuclease gene 20 | ACTTGATAACAAACT |
| | (ISG20), transcript variant 1, mRNA | AGAAACTGAAACAGG |
| | | GTCGGGATGCCGATG |
| SEQ ID | GI 164695749 AK315559 Homo sapiens | ACGAAAGAAGAAGAA |
| NO: 2865 | cDNA, FLI96630, Homo sapiens | GAGCAAAGGGCCTTC |
| | methionyl aminopeptidase 2 | TGCAGCAGGGGAACA |
| | (METAP2), mRNA | GGAACCTGATAAAGA |
| SEQ ID | GI 219842351 NM_002522 Homo sapiens | GCCACCTGTTCTCAA |
| NO: 2866 | neuronal pentraxin 1 | AAGCATGTTGGGGAC |
| | (NPTX1), mRNA | CAGGAGGTAAAACTG |
| | | GCCATTTATGGTGAA |
| SEQ ID | GI 115387093 NM_003000 Homo sapiens | CCCCGTATCAAGAAA |
| NO: 2867 | succinate dehydrogenase | TTTGCCATCTATCGA |
| | complex iron sulfur subunit B | TGGGACCCAGACAAG |
| | (SDHB), mRNA | GCTGGAGACAAACCT |
| SEQ ID | GI 685156953 NG_034254 Homo sapiens | CAAGTCATTGTTGAC |
| NO: 2868 | cyclin D2 | ATTGCTAGGGGACGA |
| | (CCND2), RefSeqGene on chromosome 12 | GGGGTGCCTATGCAG |
| | | CCAGCTTATAAGCTA |
| SEQ ID | GI 334191656 NG_029012 Homo sapiens | AGCATAAGAATCACC |
| NO: 2869 | integrin subunit beta 1 | TGGAGTCCAGGCCCC |
| | (ITGB1), RefSeqGene on chromosome 10 | ATGCTCAGGGATTGT |
| | | GGATTTTAAGCCTAG |
| SEQ ID | GI 169808406 NG_007450 Homo sapiens | TGCTGGCTAAGCTTG |
| NO: 2870 | leptin | TCATAAGTTCAGTGT |
| | (LEP), RefSeqGene on chromosome 7 | GACACCCTTTCCCGT |
| | | GATGGGCTGATTACA |
| SEQ ID | GI 1024846809 NG_046989 Homo sapiens | CGGCAGGATCCTGGC |
| NO: 2871 | matrix metallopeptidase 14 | TTCAGCTGGATCACA |
| | (MMP14), RefSeqGene on chromosome 14 | CCTCTTACCACATTC |
| | | CAAGTTCCTAGTTTC |
| SEQ ID | GI 224809428 NG_011537 Homo sapiens | CCTCATTTGAACGCG |
| NO: 2872 | myosin heavy chain 3 | ATCAGCATGGGTGCC |
| | (MYH3), RefSeqGene on chromosome 17 | TTTCTGGTCCACTCA |
| | | ACACCTTTGATCTTG |
| SEQ ID | GI 345842421 NG_029949 Homo sapiens | TGAAAGGGAAAGAAC |
| NO: 2873 | TNF superfamily member 13 | CAAAAAGCACCTGAG |
| | (TNFSF13), RefSeqGene on chromosome 17 | AGTGCCAAGAAGTCC |
| | | TGACCGACACACTCT |
| SEQ ID | GI 4572463 AF123653 Homo sapiens | ACCTGACCGTGCTGG |
| NO: 2874 | FEZI | AGAACCCCATAACCT |
| | (FEZl) gene, complete cds | CTGCATCTATTAGTG |
| | | GGAAAGCAGCTTTTC |
| SEQ ID | GI 953768433 NG_016863 Homo sapiens | ACGATTGCTTTCGTT |
| NO: 2875 | delta like non-canonical Notch ligand 1 | CGTTAATTCTCACAC |
| | (DLK1), RefSeqGene on chromosome 14 | ACCACATCCGACTCG |
| | | CACTCACATCCAGCT |
| SEQ ID | GI 170014708 NG_007458 Homo sapiens | TGGTAAACGTCAGTC |
| NO: 2876 | notch 1 | TCGTCCCTGGTTTCT |
| | (NOTCH1), RefSeqGene on chromosome 9 | GACGTAATTACCTCC |
| | | CGTGTTACCAGGACG |
| SEQ ID | GI 194018405 NG_008205 Homo sapiens | TTCCTGGTCTACCAC |
| NO: 2877 | phosphoenolpyruvate carboxykinase 1 | TGGACCACATGACTC |
| | (PCK1), RefSeqGene on chromosome 20 | CAAAACCAACACTGT |
| | | GACTGACGTCCTCTA |
| SEQ ID | GI 671744853 NG_034216 Homo sapiens | TCTGTATCTTGTTTC |
| NO: 2878 | vascular endothelial growth factor C | TATTCTGGCCCTGGC |
| | (VEGFC), RefSeqGene on chromosome 4 | TTGTGTTCTGCCTTT |
| | | CCAAAGCCCTCTCCA |
| SEQ ID | GI 116069823 EF050529 Homo sapiens | AGCTGGAGAAGTCCA |
| NO: 2879 | caspase 10, apoptosis- | GCTCAGCCTCAGATG |
| | related cysteine peptidase | TTTTTGAACATCTCT |
| | (CASP10) gene, complete cds | TGGCAGAGGATCTGC |
| SEQ ID | GI 117606585 EF064767 Homo sapiens | CCAGAGTCCTGGGGA |
| NO: 2880 | chemokine | TGGCCCAGTCTGAGT |
| | (C-C motif) ligand 17 | TCTTCATGGAAAATT |
| | (CCL17) gene, complete cds | GTCCTCTGAATCCAC |
| SEQ ID | GI 2246432 U45984 Homo sapiens | CTGGAAGTGCTTCGG |
| NO: 2881 | CCR6 chemokine receptor | AAAGAAGGGGACAAT |
| | (CMKBR6) gene, complete cds | GGCAGAACAGGTGTT |
| | | GGTGACAATTGTCAC |
| SEQ ID | GI 117606537 EF064743 Homo sapiens | AAGCAGCAGAGTGCT |
| NO: 2882 | chemokine | TGATGTCATTGGAGC |
| | (C-X-C motif) ligand 13 | TTGGAGAAGGGGAGA |
| | (B-cell chemoattractant) | CAGGAAGACAAGAAG |
| | (CXCL13) gene, complete cds | |
| SEQ ID | GI 12584865 AF307860 Homo sapiens | TCTTGAGGAGCATTA |
| NO: 2883 | CYR61 protein | AGGTATTTCGAAACT |
| | (CYR61) gene, complete cds | GCCAAGGGTGCTGGT |
| | | GCGGATGGACACTAA |
| SEQ ID | GI 237858769 NG_012123 Homo sapiens | AGTAGAGACATGCTT |
| NO: 2884 | C-C motif chemokine ligand 2 | CCAACACTCAGAAGC |
| | (CCL2), RefSeqGene on chromosome 17 | CTATGTGAACACTCA |
| | | GCCAGCAAAGCTGGG |
| SEQ ID | GI 324021724 NG_028154 Homo sapiens | TGCTTGGGTCCTTCA |
| NO: 2885 | fatty acid binding protein 5 | GAGAAGTGCACAAAA |
| | (FABP5), RefSeqGene on chromosome 8 | TCAGCTGCATGCTGG |
| | | TTTTACAGCTCTGTG |
| SEQ ID | GI 224809344 NG_011510 Homo sapiens | TCAGTTGTTGGTCTT |
| NO: 2886 | lanosterol synthase | TGAGCTCCTGTTAGT |
| | (LSS), RefSeqGene on chromosome 21 | CCAGCCGTCTCTCGT |
| | | GGTCTCTTTTCTCCT |
| SEQ ID | GI 225007577 NG_011607 Homo sapiens | GTTTGGTGCTCTCTG |
| NO: 2887 | MER proto-oncogene, tyrosine kinase | TGGGTTTAAGGATTT |
| | (MERTK), RefSeqGene on chromosome 2 | TTCTTCCTTCCAAGG |
| | | ATGGGCATGGAGGGC |
| SEQ ID | GI 225543321 NG_011651 Homo sapiens | CTACAACCCCCAGCT |
| NO: 2888 | NLRfamily pyrin domain containing 1 | TACAGATGAGAAAAC |
| | (NLRP1), RefSeqGene on chromosome 17 | TGAGGCTCATAGGGG |
| | | CTAATGGCCAGCATC |
| SEQ ID | GI 153792589 NM_001017963 Homo sapiens | ACCAAGAAAAGGCCC |
| NO: 2889 | heat shock protein 90 alpha family | AAGTGTTTCTCTGGC |
| | class A member 1 | ATCTGATGGTGTCTG |
| | (HSP90AA1), transcript variant 1, [symbol] | GATCCACCACTCTAC |
| SEQ ID | GI 295842487 NM_014470 Homo sapiens | AGCCAATGAGAAGGA |
| NO: 2890 | Rho family GTPase 1 | AACCTCATCTTTGCA |
| | (RND1), mRNA | TAGCCCATGCCTCAT |
| | | GGAGAGGTGACATCA |
| SEQ ID | GI 385198082 NM_005226 Homo sapiens | TACTCCAAGAAGTAC |
| NO: 2891 | sphingosine-1-phosphate receptor 3 | ATTGCCTTCTGCATC |
| | (S1PR3), mRNA | AGCATCTTCACGGCC |
| | | ATCCTGGTGACCATC |
| SEQ ID | GI 1168024008 KY497359 Homo sapiens | AGTTTCCCGTTCCTC |
| NO: 2892 | HLA-E | TCGTAACCTGGTCAT |
| | (HLA-E) gene, complete cds | GTGTCCTTCTTCCTG |
| | | GATACTCATGACGCA |
| SEQ ID | GI 27501939 AY208161 Homo sapiens | GTGGTCCAGAGGAAG |
| NO: 2893 | transforming growth factor, beta 3 | CTGGAGGTAAATGTA |
| | (TGFB3) gene, complete cds | GATTCCCTGGTCCCA |
| | | CCCACCCTTATAGAA |
| SEQ ID | GI 56157779 AY835629 Homo sapiens | TTTTGAGGACACAGG |
| NO: 2894 | superoxide dismutase 1, soluble | CCTAGAGCAGTTAAG |
| | (amyotrophic lateral sclerosis 1 | CAGCTTGCTGGAGGT |
| | (adult)) | TCACTGGCTAGAAAG |
| | (SOD1) gene, [symbol] complete [symbol] | |
| SEQ ID | GI 1024846791 NG_047016 Homo sapiens | TTTCTGCTTCAGTCA |
| NO: 2895 | bactericidal/permeability- | CATCTTTGGGTGCAA |
| | increasing protein | TTAGCACTTCCCCAT |
| | (BPI), RefSeqGene on chromosome 20 | GACTCTCCCAGCTCT |
| SEQ ID | GI 350606343 NG_030328 Homo sapiens | TGTCTGTGAGACAGG |
| NO: 2896 | neuropilin 1 | AGATGGGTCATATGG |
| | (NRP1), RefSeqGene on chromosome 10 | GCTGGGTCCCGATAT |
| | | GTGAATGGCTCATTA |
| SEQ ID | GI 42794751 NM_004457 Homo sapiens | TAAGGGGAGTGTTAG |
| NO: 2897 | acyl-CoA synthetase | GAGCAGCCAGGACTG |
| | long chain family member 3 | TGTAGTGTGTGTTTG |
| | (ACSL3), transcript variant 1, mRNA | GTTGCATCACAAACA |
| SEQ ID | GI 345199309 NM_002167 Homo sapiens | CAGGTCACTGTAGCG |
| NO: 2898 | inhibitor of DNA binding 3, HLH protein | GGACTTCTTTTGGTT |
| | (ID3), mRNA | TTCTTTCTCTTTGGG |
| | | GCACCTCTGGACTCA |
| SEQ ID | GI 55953136 NM_002163 Homo sapiens | ACCAGCCACTTGGAA |
| NO: 2899 | interferon regulatory factor 8 | GACGAGGTTACGCTG |
| | (IRF8), mRNA | TGCTTTGAATAAGAG |
| | | CCCAGATTTTGAGGA |
| SEQ ID | GI 356582493 NM_001244 Homo sapiens | GAGAGACAATGATGA |
| NO: 2900 | TNF superfamily member 8 | CCCTGGAAGTGGGGA |
| | (TNFSF8), transcript variant 1, mRNA | GGAGGACTTCTGAGA |
| | | AACAGCAACCTCTCT |
| SEQ ID | GI 1150273800 NG_052917 Homo sapiens | GAGATAAAGGGAGAG |
| NO: 2901 | adenosine A1 receptor | AGTGGTCAGAGATAA |
| | (ADORAl), RefSeqGene on chromosome 1 | TGGGTCACTGGCCCA |
| | | GGTACAGCATGGAGG |
| SEQ ID | GI 1048072306 NG_051267 Homo sapiens | TCTAGTCTGGGCCCC |
| NO: 2902 | arsA arsenite transporter, | CCAAGTAGAAATAGG |
| | ATP-binding, homolog 1 | GGTATCTTTGGGTTG |
| | (bacterial) | GGTAACCATCTCTGG |
| | (ASNAl), RefSeqGene on chr [symbol] | |
| SEQ ID | GI 292658840 NG_016861 Homo sapiens | GCATACTTGCCTCTT |
| NO: 2903 | C-X-C motif chemokine ligand 12 | CTGGACAGCTGATCC |
| | (CXCL12), RefSeqGene on chromosome 10 | TTAGCAGGGAAAGGT |
| | | GCTCCCTTTTCTCTG |
| SEQ ID | GI 224809263 NG_011469 Homo sapiens | GAGGCTCCTCATGCA |
| NO: 2904 | microsomal triglyceride transfer protein | ACTATCTTTATTTCC |
| | (MTTP), RefSeqGene on chromosome 4 | CTGTCGCCTCTCAGC |
| | | ACTGCAGCTTCATGT |
| SEQ ID | GI 238637280 NG_012233 Homo sapiens | TTGGTGGCTACAAGG |
| NO: 2905 | pyruvate dehyrogenase | TGACTCTGGGACAGA |
| | phosphatase catalytic subunit 1 | TGCATGGCCTTTTAA |
| | (PDP1), RefSeqGene on chromosom [symbol] | CAGAAAGGAGAACCA |
| SEQ ID | GI 893579206 NG_007504 Homo sapiens | TCTTCCACGAGGTAG |
| NO: 2906 | sonic hedgehog | TGCTGGGACTGTGAG |
| | (SHH), RefSeqGene on chromosome 7 | GGAAATTCTCATTGA |
| | | GAGTGCAGACTCCAT |
| SEQ ID | GI 50659096 NM_005218 Homo sapiens | GCCAAGTGCTGCAAG |
| NO: 2907 | defensin beta 1 | TGAGCTGGGAGTGAC |
| | (DEFB1), mRNA | CAGAAGAAATGACGC |
| | | AGAAGTGAAATGAAC |
| SEQ ID | GI 183300 M63509 Human | TCAGCTACCCACTAT |
| NO: 2908 | glutathione transferase M2 | CCTTCGTGAACATCC |
| | (GSTM2) mRNA, complete cds | CCTCCCATCATTACC |
| | | CTTCCCTGCACTAAA |
| SEQ ID | GI 15021772 AF400075 Homo sapiens | AGCTGTTTGTCTGTA |
| NO: 2909 | coagulation factor II | ACTGAGTGGGGGGAT |
| | (thrombin) receptor-like 1 | GCTGCCTTGAGCATC |
| | (F2RL1) gene, complete cds | TGTGAGTGTGTATTT |
| SEQ ID | GI 345441799 NG_029868 Homo sapiens | CATCAACATCCTCCT |
| NO: 2910 | advanced glycosylation | CACTGCTCTTCTCCC |
| | end-product specific receptor | TCCTCTGTAGACGAA |
| | (AGER), RefSeqGene on chromosome | AGCGCCGTAACTTCA |
| SEQ ID | GI 237858740 NG_012111 Homo sapiens | GAACGTTTGTTTTCC |
| NO: 2911 | platelet derived growth factor subunit B | CCTCTGTAAAATGGG |
| | (PDGFB), RefSeqGene on chromosome 22 | GGTTAGATTGGCCAT |
| | | GGGAGATGCTGGCTG |
| SEQ ID | GI 216548280 NG_009104 Homo sapiens | CCATAGAGAAGTGAC |
| NO: 2912 | retinol binding protein 4 | TGGCCTAGGGGCACA |
| | (RBP4), RefSeqGene on chromosome 10 | GGGTGAATTTTTGGC |
| | | ACTTAGTGACACCTC |
| SEQ ID | GI 219802033 NM_001143835 Homo sapiens | TGAACTCATCTTAGC |
| NO: 2913 | nuclear factor related to | CTTGTTCAGTGGGGA |
| | kappaB binding protein | GAACTTCCGCTTTGG |
| | (NFRKB), transcript variant 1, mRNA | AAACCCTCTGCACAT |
| SEQ ID | GI 21914799 AY131997 Homo sapiens | GTGGAGCTGACATCT |
| NO: 2914 | tumor necrosis factor | GAAGTCACTGCCTGT |
| | receptor superfamily, member 1A | CAGGGTAGCTATAAA |
| | (TNFRSF1A) gene, complete cds | GGAGGGAAGCAGAGT |
| SEQ ID | GI 383209671 NG_032573 Homo sapiens | GCTGCTTGTTGCCTG |
| NO: 2915 | DnaJ heat shock protein family | CTCTGTCTTGTGTGC |
| | (Hsp40) member B6 | TGTGACTGATGGGCA |
| | (DNAJB6), RefSeqGene on chromosome | GGTTTTTAGTTACTG |
| SEQ ID | GI 757813200 NG_012843 Homo sapiens | CCCCACAACTGTGAC |
| NO: 2916 | lipin 1 | AGCAGCTTCCCATGA |
| | (LPIN1), RefSeqGene on chromosome 2 | TGCCTTTTTCATCCT |
| | | CAAAGCAGATCTGTG |
| SEQ ID | GI 281332105 NG_016229 Homo sapiens | TGCAAGGGCAGCTCA |
| NO: 2917 | toll like receptor 2 | GGATCTTTAAACTCC |
| | (TLR2), RefSeqGene on chromosome 4 | ATTCCCTCAGGGCTC |
| | | ACAGAAGCTGTAAAA |
| SEQ ID | GI 428673540 NM_006273 Homo sapiens | CAAACCAGAAACCTC |
| NO: 2918 | C-C motif chemokine ligand 7 | CAATTCTCATGTGGA |
| | (CCL7), mRNA | AGCCCATGCCCTCAC |
| | | CCTCCAACATGAAAG |
| SEQ ID | GI 567316248 NM_022128 Homo sapiens | CTTGGAAGACATGCT |
| NO: 2919 | ribokinase | CAACAGATCCAATTT |
| | (RBKS), transcript variant 1, mRNA | CATTGCAGCAGTCAG |
| | | TGTCCAGGCTGCAGG |
| SEQ ID | GI 148733545 EF636667 Homo sapiens | CAGGCTCTGGTTCTC |
| NO: 2920 | caspase 4, apoptosis- | AGACTGTTCTCACAA |
| | related cysteine peptidase | TGCAGATCACCAATC |
| | (CASP4) gene, complete cds | ACTCAGGGTTGGCTT |
| SEQ ID | GI 662840 L39370 Homo sapiens | CGCCCTGCTCCGTTC |
| NO: 2921 | heat shock protein 27 | CTCCCAAAACTCTGA |
| | (HSPB1) gene, complete cds | ATCGAAGAACTTTCC |
| | | GGAAGTTTCTGAGAG |
| SEQ ID | GI 374349247 NG_032044 Homo sapiens | TCATTCGTCTTATTT |
| NO: 2922 | glutamic-oxaloacetic transaminase 1 | CTGTTCCTCTGGGAC |
| | (GOT1), RefSeqGene on chromosome 10 | AAGAGGAGTGGTGGG |
| | | CCTTCTTCCACTCCT |
| SEQ ID | GI 1024846788 NG_047009 Homo sapiens | CAGCAAGGATGATTT |
| NO: 2923 | platelet and endothelial | CTTACTTACTCTGTC |
| | cell adhesion molecule 1 | AGCCCAGCACCTGGC |
| | (PECAM1), RefSeqGene on chromosome | ACAGGTTCTCGACAC |
| SEQ ID | GI 342307092 NM_001716 Homo sapiens | CCCTAAGACGTCCCT |
| NO: 2924 | C-X-C motif chemokine receptor 5 | TTTTTCTCTGAGTAT |
| | (CXCR5), transcript variant 1, mRNA | CTCCTCGCAAGCTGG |
| | | GTAATCGATGGGGGA |
| SEQ ID | GI 32479526 NM_000218 Homo sapiens | CGGGCCACCATTAAG |
| NO: 2925 | potassium voltage-gated | GTCATTCGACGCATG |
| | channel subfamily Q member 1 | CAGTACTTTGTGGCC |
| | (KCNQ1), transcript variant 1, mRN [symbol] | AAGAAGAAATTCCAG |
| SEQ ID | GI 1049010878 AH003215 Homo sapiens | CCCTGCTTTCAAGCC |
| NO: 2926 | CD8 antigen | TCTTAGCGCACCTGG |
| | (CD8A) gene, complete cds, | AAGCGACTTAGATAC |
| | alternatively spliced | TGTTCCCATTTCACA |
| SEQ ID | GI 47419892 AY623660 Homo sapiens | GTTTCATTCAGTGTG |
| NO: 2927 | TNF receptor-associated factor 2 | AGAGTGAAGAGGCCA |
| | (TRAF2) gene, complete cds | ACGGGGCAGGTCATG |
| | | TAACCTCTGTGTCAG |
| SEQ ID | GI 347658933 NG_030027 Homo sapiens | TTCTGCTGGGGACCA |
| NO: 2928 | AT-rich interaction domain 5B | GAAAGGAGGGACAGC |
| | (ARID5B), RefSeqGene on chromosome 10 | AGGGTATAGTGAAAG |
| | | AGTGCTAAGCTTACA |
| SEQ ID | GI 225007577 NG_011607 Homo sapiens | AGAGAGAACAGCCAG |
| NO: 2929 | MER proto-oncogene, tyrosine kinase | TGCAAACCTTTGGGC |
| | (MERTK), RefSeqGene on chromosome 2 | GGAGGAGTGCTTGGT |
| | | ATATGTGAGCAATAG |
| SEQ ID | GI 334848111 NG_029036 Homo sapiens | CAATCTCAGAATCCA |
| NO: 2930 | promyelocytic leukemia | GTCCGCGTGATGATG |
| | (PML), RefSeqGene on chromosome 15 | CTCTCCTCACTGGAC |
| | | TGAGTAGGGGTCAAT |
| SEQ ID | GI 1025608669 NG_047000 Homo sapiens | GGTCCATACAGGCAC |
| NO: 2931 | prostaglandin E receptor 4 | TCAGAGGCCAAGTCA |
| | (PTGER4), RefSeqGene on chromosome 5 | CCTTCTATCTAGTGG |
| | | CTCTGCCATATACCC |
| SEQ ID | GI 632794850 NM_002957 Homo sapiens | TTGCTGTTTATCGAT |
| NO: 2932 | retinoid X receptor alpha | GCTGGTTTTCAGAAT |
| | (RXRA), transcript variant 1, mRNA | TCCTGTGTGGCCCTC |
| | | CTGTCTGGAGTGACA |
| SEQ ID | GI 116069823 EF050529 Homo sapiens | TGCATGTTTCTGAGC |
| NO: 2933 | caspase 10, apoptosis- | TCATCTTCCCAGCTC |
| | related cysteine peptidase | TCTCCAGGAGCTCCT |
| | (CASP10) gene, complete cds | ACTCCTGAATTTCCA |
| SEQ ID | GI 1036032812 AH005421 Homo sapiens | TTCAAATACTGCCCA |
| NO: 2934 | CD19 | ACCTCAAAGCCCAGC |
| | (CD19) gene, complete cds | TCCAAAGCTACCTCC |
| | | TCTGTGAAGAACTCC |
| SEQ ID | GI 4455060 AF118265 Homo sapiens | ATCCAAGTTTCAGAG |
| NO: 2935 | orphan G protein-coupled receptor GPR44 | GCAGAAAAAGGCTCG |
| | (GPR44) gene, complete cds | GGAAGGTTAAATGAC |
| | | TTGCCCAAGCACAGC |
| SEQ ID | GI 146045339 EF543149 Homo sapiens | GTTCTGTCTGAACGC |
| NO: 2936 | prostaglandin E synthase | AGAGAGTTTGTTTCG |
| | (PTGES) gene, complete cds | TCCCCTTTTCCAGTT |
| | | TCTAGAGGCCCCTGG |
| SEQ ID | GI 27501939 AY208161 Homo sapiens | TTCAGAAGGGTGTGG |
| NO: 2937 | transforming growth factor, beta 3 | AATTTGAGCAGAGGC |
| | (TGFB3) gene, complete cds | TTCAAGGATGAGGTT |
| | | TGGGGATGAAGGGAT |
| SEQ ID | GI 284520137 NG_016421 Homo sapiens | AAGGAGGGCACCTAA |
| NO: 2938 | adrenoceptor beta 2 | AGTACTTGACAGCGA |
| | (ADRB2), RefSeqGene on chromosome 5 | GTGTGCTGAGGAAAT |
| | | CAGCAGCTGTTGAAG |
| SEQ ID | GI 189339222 NG_007959 Homo sapiens | AGCACACCTTGATCA |
| NO: 2939 | cytochrome P450 family | GTGCATAAAGCCTCT |
| | 27 subfamily A member 1 | GATCCTCCTTAGAGA |
| | (CYP27A1), RefSeqGene on chromosome [symbol] | AGGAGGGACTTGGGT |
| SEQ ID | GI 574290111 NG_033893 Homo sapiens | TGTAAATTCTTTGGT |
| NO: 2940 | MALTI paracaspase | GGCATGGAACATCTG |
| | (MALT1), RefSeqGene on chromosome 18 | AGCCCTAAGGATGGC |
| | | AGACCTTCCAGGAGG |
| SEQ ID | GI 1024846756 NG_047011 Homo sapiens | AAGCCAGCAGAGGCA |
| NO: 2941 | mannose receptor C-type 1 | GGTGTCTGGATCCAG |
| | (MRC1), RefSeqGene on chromosome 10 | GCTTTACTGAGTTCC |
| | | AATTCCAAGAAATCA |
| SEQ ID | GI 1147399622 NG_012448 Homo sapiens | GCAAGTTATCTTGGA |
| NO: 2942 | nodal growth differentiation factor | AGGGGGACTGGAAGA |
| | (NODAL), RefSeqGene on chromosome 10 | ACAGTAATTCGGAGT |
| | | CTGGGCTTGGCAGTT |
| SEQ ID | GI 241896851 NG_012345 Homo sapiens | CTGAGATCCAGACTG |
| NO: 2943 | peroxisome proliferator | GTTAGAAGCCTAACA |
| | activated receptor delta | TGACCTGGCGTGTGA |
| | (PPARD), RefSeqGene on chromosome 6 | GACCTTGCACTCTCT |
| SEQ ID | GI 294459987 NG_017046 Homo sapiens | AGGAGCTCCAAGTTA |
| NO: 2944 | spleen associated tyrosine kinase | GGCAGGAAAGCCCCA |
| | (SYK), RefSeqGene on chromosome 9 | AGCTTACATTTGGAT |
| | | GGGTTGACTATGAGG |
| SEQ ID | GI 219521851 NG_009233 Homo sapiens | TGCTGAAAAGCATGG |
| NO: 2945 | tyrosine 3-monooxygenase/tryptophan | TGCTGGTAACAGTTC |
| | 5-monooxygenase activation | AACAATCCGTGGCTG |
| | protein epsilon | CTCATTCTTGCCTAC |
| | (YWHA [symbol] | |
| SEQ ID | GI 411147377 NM_014339 Homo sapiens | GTTTGACGCCCAGAG |
| NO: 2946 | interleukin 17 receptor A | TACAGGATACCACAA |
| | (IL17RA), transcript variant 1, mRNA | TGCACTCTTCCTGCG |
| | | TAGAGCACATGTTCC |
| SEQ ID | GI 336285452 NM_006221 Homo sapiens | CTGATCAACGGCTAC |
| NO: 2947 | peptidylprolyl cis/trans isomerase, | ATCCAGAAGATCAAG |
| | NIMA-interacting 1 | TCGGGAGAGGAGGAC |
| | (PIN1), transcript variant 1, mRNA | TTTGAGTCTCTGGCC |
| SEQ ID | GI 727346118 NM_002728 Homo sapiens | GAACACCTGATTACT |
| NO: 2948 | proteoglycan 2, pro eosinophil | GGGCACCTGCATAGT |
| | major basic protein | GCTGCCAGGACCTTT |
| | (PRG2), transcript variant 1, mRNA | CAAGGTTGTAGGTAG |
| SEQ ID | GI 1041818013 NM_006065 Homo sapiens | AATGGAAATGTGTCC |
| NO: 2949 | signal regulatory protein beta 1 | CGGACAGAAACAGCT |
| | (SIRPB1), transcript variant 1, mRNA | TCGACCCTCATAGAG |
| | | AACAAGGATGGCACC |
| SEQ ID | GI 269846911 NM_001167942 Homo sapiens | TAGACAGATGGGTGA |
| NO: 2950 | TNF alpha induced protein 8 like 1 | CCTGTCTCCTTTGAG |
| | (TNFAIP8L1), transcript variant 1, mRNA | AGGATGCTGAGGCAT |
| | | CTGTAGCAGCTGTTT |
| SEQ ID | ref \| NG_034014.1\| Homo sapiens | TGTTTGGGATGACCA |
| NO: 2951 | cyclin dependent kinase 2 | GGATCCCAAGCCTCC |
| | (CDK2), RefSeqGene on | TGCTGCCACAATGTT |
| | | TATAAAGGCCAAATG |
| SEQ ID | GI 219842221 NG_009291 Homo sapiens | GGACTCTTTCATCAT |
| NO: 2952 | albumin | GGAAGATCTGGGGGC |
| | (ALB), RefSeqGene on chromosome 4 | AGAGGGACTTAAAAG |
| | | GTGGGACAAGCCAAA |
| SEQ ID | GI 261823945 NG_013238 Homo sapiens | GCCCCTCCCTGGGTG |
| NO: 2953 | interleukin 9 receptor | AGGACTTTAGTATTA |
| | (IL9R), RefSeqGene on chromosome X and Y | TCATAAGACCAGGGT |
| | | CATTCTCCTGGCCTT |
| SEQ ID | GI 343403834 NG_029695 Homo sapiens | CCCTGGCATGCCTGG |
| NO: 2954 | prefoldin subunit 5 | ACCATTAACCCTTAG |
| | (PFDN5), RefSeqGene on chromosome 12 | CTCCCTTCTGTTCTT |
| | | CTCTTGTAACCAAGG |
| SEQ ID | GI 257743484 NG_012879 Homo sapiens | AAGCCTCAGCATTCA |
| NO: 2955 | serpin family A member 3 | TGAAAATCCACTACT |
| | (SERPINA3), RefSeqGene on chromosome 14 | CCAGACAGACGGCTT |
| | | TGGAATCCACCAGCT |
| SEQ ID | GI 1099522105 NG_052009 Homo sapiens | TTTTGCLLGGCAGCC |
| NO: 2956 | salt inducible kinase 1 | TCTCAGGTTGGALTT |
| | (SIK1), RefSeqGene on chromosome 21 | CTCAGGATTTGCCAT |
| | | TTGTTTTAATCCCTG |
| SEQ ID | GI 685844874 NM_002988 Homo sapiens | CCACCCTGGAGGCTA |
| NO: 2957 | C-C motif chemokine ligand 18 | CCTCTTCTAAGAGTC |
| | (CCL18), mRNA | CCATCTGCTATGCCC |
| | | AGCCACATTAACTAA |
| SEQ ID | GI 224494751 NM_138801 Homo sapiens | GAGAGCCTTGCCTTT |
| NO: 2958 | galactose mutarotase | CACAGCACAGTGAGG |
| | (GALM), mRNA | ATGACATTGCACCAG |
| | | GGACAGAGATTGTAT |
| SEQ ID | GI 55775471 NM_004271 Homo sapiens | TAGCGACAGCGGCTT |
| NO: 2959 | lymphocyte antigen 86 | GGAAGTGCTCTACCA |
| | (LY86), mRNA | GAGTTGCGATCCATT |
| | | ACAAGATTTTGGCTT |
| SEQ ID | GI 332078493 NM_002559 Homo sapiens | GCGGCCTTTACTTCT |
| NO: 2960 | purinergic receptor P2X 3 | GTGGGAGTGGGAACT |
| | (P2RX3), mRNA | GTTCTCTGTGACATC |
| | | ATCCTGCTCAACTTC |
| SEQ ID | GI 238776812 NG_012249 Homo sapiens | CCCGGGGATTCAGTA |
| NO: 2961 | aldehyde dehydrogenase 1 family member A1 | GATCTGAGGTGGGGT |
| | (ALDH1A1), RefSeqGene on chromosome 9 | CAAAGAAGCACATTT |
| | | GGCTACCAAGTGATG |
| SEQ ID | GI 237874185 NG_012167 Homo sapiens | ATCCACGTGGAACCT |
| NO: 2962 | CD209 molecule | AAGTGCTCAGACCGA |
| | (CD209), RefSeqGene on chromosome 19 | GGAACAGGGACTGAG |
| | | TTAAGAAGTGGACAC |
| SEQ ID | GI 1146072968 NG_011674 Homo sapiens | CAGGCACTGTGCTAG |
| NO: 2963 | glycine amidinotransferase | GGATATACTGGTGGG |
| | (GATM), RefSeqGene on chromosome 15 | TAAAACAGACTCCCT |
| | | GTCCTTAAGGAGCCA |
| SEQ ID | GI 429535871 NG_033022 Homo sapiens | CATCTGATGATGGCC |
| NO: 2964 | interleukin 12A | TTTGTGCCCCATCAT |
| | (IL12A), RefSeqGene on chromosome 3 | CATATGGCGGAAGGT |
| | | GAGAGAGAGAGCAAG |
| SEQ ID | GI 195546896 NG_008330 Homo sapiens | GCTGCATTCTGCACA |
| NO: 2965 | integrin subunit alpha 2 | GATGTGGTGCACTTG |
| | (ITGA2), RefSeqGene on chromosome 5 | CTCTGAGACATTTGA |
| | | GTCCCAAAGCTTAGC |
| SEQ ID | GI 1025608653 NG_047027 Homo sapiens | AACAGTGGGTGCCAA |
| NO: 2966 | Jun proto-oncogene, AP-1 | CTCATGCTAACGCAG |
| | transcription factor subunit | CAGTTGCAAACATTT |
| | (JUN), RefSeqGene on chromosome | TGAAGAGAGACCGTC |
| SEQ ID | GI 401709987 NG_032900 Homo sapiens | CCTTGCACCATGTCC |
| NO: 2967 | prostaglandin-endoperoxide synthase 1 | CTGCTTGGGTCTCAA |
| | (PTGS1), RefSeqGene on chromosome 9 | GAGCACTACTGTGAC |
| | | GGTTTTCCATCATAT |
| SEQ ID | GI 238018078 NG_012202 Homo sapiens | CAGTGGGAAGTTCTG |
| NO: 2968 | TNF receptor superfamily member 11b | CTGGGGAAAACTTCA |
| | (TNFRSF11B), RefSeqGene on chromosome 8 | GGACTCCTACCTACC |
| | | AGGATGTGACTCACT |
| SEQ ID | GI 42794755 NM_016234 Homo sapiens | GCAAGCAAGATGCCC |
| NO: 2969 | acyl-CoA synthetase long chain family member 5 | ACACAACAGGCTTAT |
| | (ACSL5), transcript variant 1, mRNA | TTTCTGTGAAGGAAC |
| | | CAACTGATCTCCCCC |
| SEQ ID | GI 36030972 NM_181713 Homo sapiens | CAAGGATCTCAAAGA |
| NO: 2970 | UBX domain protein 2A | AGTCCTCCGTTTTCC |
| | (UBXN2A), mRNA | CTGGCAACAGCTCTT |
| | | CCTGTCCTCAGGTTG |
| SEQ ID | GI 1024336747 NG_046907 Homo sapiens | AGATGTTTTGGTTGT |
| NO: 2971 | acetyl-CoA carboxylase beta | CCCAGCTGATGGAGG |
| | (ACACB), RefSeqGene on chromosome 12 | TAGATGCTACTGGCA |
| | | TCAAACAGGCAGAGG |
| SEQ ID | GI 334085206 NG_029005 Homo sapiens | CAGGAAACGGATTGA |
| NO: 2972 | CASP8 and FADD like apoptosis regulator | TGGGCTGTGATGGAG |
| | (CFLAR), RefSeqGene on chromosome 2 | GGCTTCAGTCTTATC |
| | | CAAGAGGCTTGGAAT |
| SEQ ID | GI 570359607 NG_033871 Homo sapiens | AGTATCAGGAGCCCT |
| NO: 2973 | F-box protein 38 | GAATTCTAGTTTCAC |
| | (FBX038), RefSeqGene on chromosome 5 | CCCTTCCACCTACAC |
| | | ACCGTGTGACCTTGT |
| SEQ ID | GI 296923725 NG_012838 Homo sapiens | AGTTGTGCTGACTCA |
| NO: 2974 | glucose-6-phosphate isomerase | GTCTTAGGCCTGGGG |
| | (GPI), RefSeqGene on chromosome 19 | ACAGTGGGTTAGTCA |
| | | CAAGTTGGTAGAACT |
| SEQ ID | GI 342837712 NG_029640 Homo sapiens | GGGCAGAGAAGAGTT |
| NO: 2975 | mitogen-activated protein kinase- | GTTCTTTGCAGGGAC |
| | activated protein kinase 2 | TGCAGCTTTTCTTGG |
| | (MAPKAPK2), RefSeqGene on ch [symbol] | TAATGGTTTGAGGCC |
| SEQ ID | GI 570700862 NG_033874 Homo sapiens | GAGAAAGGCAGTGTT |
| NO: 2976 | nuclear factor kappa B subunit 2 | CAGGTGTCCATGTCC |
| | (NFKB2), RefSeqGene on chromosome 10 | CCACCCAACTCTGGA |
| | | GGTAAATGACATGTC |
| SEQ ID | GI 974987494 NG_011716 Homo sapiens | AGTTCCAAGCAGGCC |
| NO: 2977 | transcription factor 4 | TCTTGCACTCCCTCC |
| | (TCF4), RefSeqGene on chromosome 18 | TTTCTTAACCCTTCC |
| | | GTAACTTTCCAACAG |
| SEQ ID | GI 238018078 NG_012202 Homo sapiens | TGGAGACATATAACT |
| NO: 2978 | TNF receptor superfamily member 11b | TGAACACTTGGCCCT |
| | (TNFRSF11B), RefSeqGene on chromosome 8 | GATGGGGAAGCAGCT |
| | | CTGCAGGGACTTTTT |
| SEQ ID | GI 61744441 NM_003262 Homo sapiens | ACACAACAGCCTTTT |
| NO: 2979 | SEC62 homolog, preprotein | TACCCTTAGGAACAG |
| | translocation factor | CTTTTTGCCCTTAGC |
| | (SEC62), mRNA | ACTATGCTTGGGGGC |
| SEQ ID | GI 46241839 AY588246 Homo sapiens | GAGCTCACATTCATA |
| NO: 2980 | epidermal growth factor receptor | GGTGCCGCCAGCCTT |
| | (erythroblastic leukemia viral | CGTGCATCTTCTTGC |
| | (v-erb-b) oncogene homolog, a [symbol] | ATCATCTCTAAGGAG |
| SEQ ID | GI 1024846791 NG_047016 Homo sapiens | AAATGGAAGGCACAA |
| NO: 2981 | bactericidal/permeability- | AAGAGATTCTTGTGC |
| | increasing protein | GTTTCCATGCTTGCG |
| | (BPI), RefSeqGene on chromosome 20 | GTTTGTTGGGTGTGC |
| SEQ ID | GI 1024846743 NG_047006 Homo sapiens | GAGCTCAGACCTGAG |
| NO: 2982 | hexokinase 3 | GAGAGTGACTAGCTT |
| | (HK3), RefSeqGene on chromosome 5 | CTCTGTGTCCCAGGT |
| | | AAGCACTTCGGTCTA |
| SEQ ID | GI 1024357482 NG_046924 Homo sapiens | ACCCAGAAGCTCAAT |
| NO: 2983 | NLR family pyrin domain containing 5 | GCACACCAAAGTCTC |
| | (NLRP5), RefSeqGene on chromosome 19 | ACATGGTTAAATTGA |
| | | GGCAAGGTGGGCTTG |
| SEQ ID | GI 1036032720 AH002608 Homo sapiens | CAGGGAGTGAGATTT |
| NO: 2984 | amphiregulin | CCCCTGTGAGTGAAA |
| | (AREG) gene, complete cds | TGCCTTCTAGTAGTG |
| | | AACCGTCCTCGGGAG |
| SEQ ID | GI 341865611 NG_029556 Homo sapiens | ATAGGCCAAGTCAGA |
| NO: 2985 | growth factor receptor bound protein 2 | TGAGGGCAGGGAATT |
| | (GRB2), RefSeqGene on chromosome 17 | GACCTTTGGATTCAG |
| | | CAACAGGAGCTGATT |
| SEQ ID | GI 231570519 NG_012004 Homo sapiens | CACCTCCTTCCTTCC |
| NO: 2986 | kinase insert domain receptor | TAACCTCACTTCTTA |
| | (KDR), RefSeqGene on chromosome 4 | CTCCCCTTTGCTCAC |
| | | TCTTACCTGGCTGCT |
| SEQ ID | GI 1068937316 NG_051332 Homo sapiens | ACCACACTCTCAGGG |
| NO: 2987 | pyruvate dehyrogenase | CTCCAAGTGGCTTTT |
| | phosphatase catalytic subunit 2 | TCTGGTTGTCTCCCA |
| | (PDP2), RefSeqGene on chromoso [symbol] | TTTTTCTCTGTCTCC |
| SEQ ID | GI 389565481 NM_002054 Homo sapiens | CTGGCAACGTTCCCT |
| NO: 2988 | glucagon | TCAAGACACAGAGGA |
| | (GCG), mRNA | GAAATCCAGATCATT |
| | | CTCAGCTTCCCAGGC |
| SEQ ID | GI 207028588 NM_021970 Homo sapiens | AGTTCAGTACATATG |
| NO: 2989 | late endosomal/lysosomal | CATTGAGCACCTGTG |
| | adaptor, MAPK and MTOR activator 3 | TGCCAGTCAGCCGAG |
| | (LAMTOR3), transcript vari [symbol] | CTATCACATTGCACA |
| SEQ ID | GI 219879808 NM_000922 Homo sapiens | ATAGTGGGTCCCCTG |
| NO: 2990 | phosphodiesterase 3B | TGTAACTCCTATGAT |
| | (PDE3B), mRNA | GCTGCTGGTTTGCTA |
| | | CCAGGTCAGTGGTTA |
| SEQ ID | GI 22001412 AF531102 Homo sapiens | CCCACTCACCTCCTT |
| NO: 2991 | interleukin 1 receptor, type 1 | ATCCAACTCTCACAC |
| | (IL1R1) gene, complete cds | ACCCAAACCAATGTT |
| | | ACCCCAGCCTCAATC |
| SEQ ID | GI 86278451 DQ374395 Homo sapiens | GGAGAAAAGACACCC |
| NO: 2992 | UDP glucuronosyltransferase 1 | CAGACTTATCCCAAT |
| | family, polypeptide A1 | GAGGAACACGGCTGT |
| | (UGT1A1) gene, complete cds | TGGGTGCTTGAGTAC |
| SEQ ID | GI 189217842 NG_007929 Homo sapiens | TGTCAGAGAACAACA |
| NO: 2993 | cytochrome P450 family 2 | TGGAGGAATGAGTGG |
| | subfamily B member 6 | GAGGAGAAGTCAGAG |
| | (CYP2B6), RefSeqGene on | CGGTAATAGGGCCAC |
| | chromosome 19 [symbol] | |
| SEQ ID | GI 761631399 NG_042041 Homo sapiens | ATGACTCCAACAGCT |
| NO: 2994 | integrin subunit beta 6 | TTGATTTCTGTTCTG |
| | (ITGB6), RefSeqGene on chromosome 2 | CTTCAGGGGCAAAGG |
| | | TCCAGATGACCCTCA |
| SEQ ID | GI 1212890194 NG_032955 Homo sapiens | AGGTCGCTGCAGGCA |
| NO: 2995 | mitogen-activated protein kinase | TACCTTGGAGATTTT |
| | 8 interacting protein 2 | GCAGGTTTGGTTCTA |
| | (MAPK8IP2), RefSeqGene on chro [symbol] | GACCACCACACTAAG |
| SEQ ID | GI 225579099 NG_011677 Homo sapiens | TTGCCCCTTCCCCAT |
| NO: 2996 | pyruvate kinase, liver and RBC | CTCCATTTCACACAG |
| | (PKLR), RefSeqGene on chromosome 1 | GTCCTGAAAGTCTGT |
| | | GTCCAATTATGCACT |
| SEQ ID | GI 91984778 NM_002214 Homo sapiens | TTGCTGCTGGTGATG |
| NO: 2997 | integrin subunit beta 8 | ACAGATCAGACGTCT |
| | (ITGB8), mRNA | CATCTCGCTCTTGAT |
| | | AGCAAATTGGCAGGC |
| SEQ ID | GI 52854078 AY755659 Homo sapiens | GCCCCCAACACATGG |
| NO: 2998 | small proline-rich protein 1A | AGCCAAGCACTTGAA |
| | (SPRRIA) gene, complete cds | CACTCACACCATACC |
| | | CACAAACACATATTC |
| SEQ ID | GI 257153342 NG_012809 Homo sapiens | GTCCGTGGAGATCAT |
| NO: 2999 | cysteinyl leukotriene receptor 1 | GAGGTCTCCTGCAGC |
| | (CYSLTR1), RefSeqGene on chromosome X | TAAGATTCCAAATGT |
| | | CCATGGCCCAAATGT |
| SEQ ID | GI 334883167 NG_029059 Homo sapiens | GTTAGACATCAAGGT |
| NO: 3000 | mitogen-activated protein kinase 9 | GGAACTGGGAATAGG |
| | (MAPK9), RefSeqGene on chromosome 5 | GAGGCAGAGGAATGA |
| | | GCCTGGAGTTCAGGA |
| SEQ ID | GI 116734711 NM_000020 Homo sapiens | CCAGCATTGTGCAAG |
| NO: 3001 | activin A receptor like type 1 | GCTCGGAAGAGAACC |
| | (ACVRL1), transcript variant 1, mRNA | AGGAAGTGAAACTGG |
| | | GTGAAAACAGAAAGC |
| SEQ ID | GI 541862110 NM_017434 Homo sapiens | TCCTGGACATCCTGG |
| NO: 3002 | dual oxidase 1 | TGGTCTTCATGAAAG |
| | (DUOX1), transcript variant 1, mRNA | GCTCTCCTGAGGAAA |
| | | AGTCTCGCCTTATGT |
| SEQ ID | GI 260763875 NM_182569 Homo sapiens | AGAAGCAGCGATTCC |
| NO: 3003 | Glycerophosphodiester | TCAGTAAACACATCT |
| | phosphodiesterase domain containing 1 | CTCACCGCGGAGGTG |
| | (GDPD1), transcript variant [symbol] | CTGGAGAAAATTTGG |
| SEQ ID | GI 315360639 NM_012474 Homo sapiens | CCTTCACACTAATGA |
| NO: 3004 | uridine-cytidine kinase 2 | GCCTTCTACTGACCC |
| | (UCK2), mRNA | AAGTTTCTTTTTCTC |
| | | GGGCAGCCTGGGACC |
| SEQ ID | GI 84872755 DQ355026 Homo sapiens | GGCTGGCTGTGCCCT |
| NO: 3005 | caspase 8, apoptosis-related | TCCGTCCTTCATTAG |
| | cysteine peptidase | ACGTTTGCTCTTGTC |
| | (CASP8) gene, complete cds | TTAGATGCTCAGATG |
| SEQ ID | GI 117606581 EF064765 Homo sapiens | TAGTTTGAGATAAGT |
| NO: 3006 | chemokine | GGGGCTGGGTGCCAG |
| | (C-C motif) ligand 21 | CAAATCCAGCTTTCA |
| | (CCL21) gene, complete cds | GGAAGGAAAAGGAGT |
| SEQ ID | GI 20336662 AF503510 Homo sapiens | AACAGCTTGCAGACT |
| NO: 3007 | coagulation factor X | CCAGTTTCGAAATCC |
| | (F10) gene, complete cds | TCTCTTTGCAGATGG |
| | | CGACCAGTGTGAGAC |
| SEQ ID | GI 1028630732 NG_050570 Homo sapiens | GCTGCCATCATTCCA |
| NO: 3008 | carnitine palmitoyltransferase 1C | GCAATCAGCAACTCC |
| | (CPT1C), RefSeqGene on chromosome 19 | ATGATGCCACACCCC |
| | | ACTATACACAACAAC |
| SEQ ID | GI 189217848 NG_007931 Homo sapiens | CGGAGGGAAGAGAGT |
| NO: 3009 | cytochrome P450 family 2 | CAGAGATCTGCCTAT |
| | subfamily J member 2 | ATCTCCTCCAAGGGG |
| | (CYP2J2), RefSeqGene on chromosome 1 | AAGTGCACCTCCTTA |
| SEQ ID | GI 401782607 NG_032906 Homo sapiens | TGATTGCGCATTACT |
| NO: 3010 | coagulation factor II thrombin receptor | CATTCCTTTCTCACA |
| | (F2R), RefSeqGene on chromosome 5 | CTTCCACCACAGAGG |
| | | CTGCCTACTTTGCCT |
| SEQ ID | GI 224586932 NG_011403 Homo sapiens | GTTCACCTGCAGCTT |
| NO: 3011 | coagulation factor VIII | CTTGTTGCTGGGGTA |
| | (F8), RefSeqGene on chromosome X | ACTTTACCCTTGTAG |
| | | GCAGCTCTAGTGGAC |
| SEQ ID | GI 368711279 NG_031983 Homo sapiens | TCTTCATGTCACCTT |
| NO: 3012 | heat shock protein family B | CTTGACAGCATTTGC |
| | (small) member 6 | CAGGCATCCAGCAGG |
| | (HSPB6), RefSeqGene on chromosome 19 | CGCTTAATAAATGGC |
| SEQ ID | GI 270483830 NG_016181 Homo sapiens | AAGCTCCTAAAGGGT |
| NO: 3013 | sphingosine-1-phosphate receptor 1 | TCATTTGGCCCCTCC |
| | (SIPR1), RefSeqGene on chromosome 1 | TCAAAGACTAATGTC |
| | | CCCATGTGAAAGCGT |
| SEQ ID | GI 30841527 AY277591 Homo sapiens | TGGCATTTATCTTTG |
| NO: 3014 | GalNAc-T5 | TAGCTTCTGTCATCT |
| | (GALNT5) mRNA, complete cds | GGCTCCTCTTTGACA |
| | | TGGCAGCTCTCCGCC |
| SEQ ID | GI 327412387 NG_028268 Homo sapiens | CACTCCCTGAAAACT |
| NO: 3015 | ATP binding cassette | CACTCTTGCTTTCAG |
| | subfamily C member 1 | ATTTGAGGGCCACTT |
| | (ABCC1), RefSeqGene on chromosome 16 | CCACCTCACTAGGCC |
| SEQ ID | GI 1025608659 NG_047042 Homo sapiens | ATTGGCCAAGCCTGG |
| NO: 3016 | cell division cycle 42 | GTCACGTGTCCATTC |
| | (CDC42), RefSeqGene on chromosome 1 | CCGCAACTAGAGATA |
| | | GTGTCATCTCTAGAG |
| SEQ ID | GI 268370133 NG_015859 Homo sapiens | AGGAGGTAGAAAGGA |
| NO: 3017 | GATA binding protein 3 | ACGGAAAAGTGCTCC |
| | (GATA3), RefSeqGene on chromosome 10 | AGGTGTGTATCTCAG |
| | | CTTCCTGTGCTCTGT |
| SEQ ID | GI 742670592 NG_013347 Homo sapiens | CTGCACCTCCCTCAG |
| NO: 3018 | glutamate-ammonia ligase | TGAGGACTGTAGGAA |
| | (GLUL), RefSeqGene on chromosome 1 | TTTCAGTATTTTAGA |
| | | GATGGTGGCCCCGGA |
| SEQ ID | GI 297515475 NG_021404 Homo sapiens | GCCTGGTTTGTCACA |
| NO: 3019 | matrix metallopeptidase 13 | GCTGAGATACAGCTG |
| | (MMP13), RefSeqGene on chromosome 11 | CACCATGGCAAACTG |
| | | GTGAAGCAACATTAG |
| SEQ ID | GI 431822400 NM_001271969 Homo sapiens | TTTTCCCTCTCCTGT |
| NO: 3020 | heat shock protein 90 alpha | CCTTGTGTTGAAGGC |
| | family class B member 1 | AGTAAACTAAGGGTG |
| | (HSP90AB1), transcript | TCAAGCCCCATTCCC |
| | variant 1, [symbol] | |
| SEQ ID | GI 20379137 AF498982 Homo sapiens | TGCAAAGAGTCCTGC |
| NO: 3021 | 5-hydroxytryptamine receptor 2A | AATGAGGATGTCATT |
| | (HTR2A) mRNA, complete cds | GGGGCCCTGCTCAAT |
| | | GTGTTTGTTTGGATC |
| SEQ ID | GI 599044742 NM_012234 Homo sapiens | TGCACCTTCAGAAAC |
| NO: 3022 | RING1 and YYl binding protein | AGTGCTGAAGCCTTT |
| | (RYBP), mRNA | AAATGCAGCATCTGC |
| | | GATGTGAGGAAAGGC |
| SEQ ID | GI 58258007 AY902236 Homo sapiens | GCCTTACCTGCTCTG |
| NO: 3023 | flavin containing monooxygenase 5 | GGGAATTGCAGGTTG |
| | (FMO5) gene, complete cds | CCACATAACAAAGCA |
| | | TTTCTGTGTGGGTAC |
| SEQ ID | GI 14488405 AF386077 Homo sapiens | TCTACATGTCCACAG |
| NO: 3024 | interleukin 17B | GTCCAGTTCACCCAC |
| | (IL17B) gene, complete cds | TTCCTTGTCCCGTAT |
| | | TTAGCAGATGGGGAA |
| SEQ ID | GI 38045925 AY449709 Homo sapiens | GGCAAGTGCGGCTGT |
| NO: 3025 | interleukin 7 receptor | CCTATGTCTCCTTTT |
| | (IL7R) gene, complete cds | CCAGAAGGATGAAGA |
| | | TGTCTTTGGGACTGG |
| SEQ ID | GI 161086962 NG_007114 Homo sapiens | CCCCAGAGACCTTGT |
| NO: 3026 | insulin | TCAGGAAAGGGAATG |
| | (INS), RefSeqGene on chromosome 11 | AGAACATTCCAGCAA |
| | | TTTTCCCCCCACCTA |
| SEQ ID | GI 342307076 NG_029608 Homo sapiens | AGATGACATTTAGTC |
| NO: 3027 | phospholipase D2 | TAAGTCTGTGGCAAG |
| | (PLD2), RefSeqGene on chromosome 17 | CAGCAAAGCAGGGCA |
| | | TATGTGGCAGAGCCT |
| SEQ ID | GI 429535866 NG_033016 Homo sapiens | TGGAAAGTAGAAGGG |
| NO: 3028 | receptor interacting | GAGCGAGCTATGCAG |
| | serine/threonine kinase 2 | AGAAATCACATGGTG |
| | (RIPK2), RefSeqGene on chromosome 8 | AGACAGGATGCAGGA |
| SEQ ID | GI 1154491910 NG_052982 Homo sapiens | ACTTGTTGGCCTTGT |
| NO: 3029 | ubiquitin conjugating enzyme E2 G2 | GTTCTTTCCGACCCA |
| | (UBE2G2), RefSeqGene on chromosome 21 | AGACATGGCTTAGTA |
| | | AGTGAGCAGTGTGGT |
| SEQ ID | GI 112293258 NM_001736 Homo sapiens | CCCCTGATTATGGGC |
| NO: 3030 | complement C5a receptor 1 | ACTATGATGACAAGG |
| | (C5AR1), mRNA | ATACCCTGGACCTCA |
| | | ACACCCCTGTGGATA |
| SEQ ID | GI 572873826 NM_001130080 Homo sapiens | AGCCATCCTGACCCA |
| NO: 3031 | interferon alpha inducible protein 27 | GCGAGGAGCCAACTA |
| | (IFI27), transcript variant 1, mRNA | TCCCAAATATACCTG |
| | | GGGTGAAATATACCA |
| SEQ ID | GI 523498473 NM_006332 Homo sapiens | TGAAGAAGTCCAATG |
| NO: 3032 | IFI30, lysosomal thiol reductase | CACCGCTTGTCAATG |
| | (IFI30), mRNA | TGACCCTCTACTATG |
| | | AAGCACTGTGCGGTG |
| SEQ ID | GI 32891808 AY341028 Homo sapiens | GGAAGCTTCAATATC |
| NO: 3033 | microsomal glutathione S-transferase 2 | AAAGGAGCAGGGGAT |
| | (MGST2) gene, complete cds | TGTTCAAAGAGGGCT |
| | | CTCGCCAGGGAATGA |
| SEQ ID | GI 169234676 NG_007118 Homo sapiens | CTGGAATAACCACAG |
| NO: 3034 | ATP binding cassette | GAATGTTGGTTGGCT |
| | subfamily B member 4 | TGGAATGGATGAAGG |
| | (ABCB4), RefSeqGene on chromosome 7 | GAAATGGAACCGGGC |
| SEQ ID | GI 219521908 NG_009245 Homo sapiens | ATAGGCTGGATCCTG |
| NO: 3035 | bone morphogenetic protein | CTCACTGCATCTTAT |
| | receptor type 1B | TACTCCGGTTTCCCC |
| | (BMPR1B), RefSeqGene on chromosome 4 | TTTGCTTTCAGCAGC |
| SEQ ID | GI 916259104 NG_042801 Homo sapiens | AAATGGGAAGCCAGT |
| NO: 3036 | bromodomain containing 2 | TCTGCAAATTGGCCT |
| | (BRD2), RefSeqGene on chromosome 6 | TTCTGTTCTGTGAAG |
| | | TGCCATCTGTCGGTG |
| SEQ ID | GI 357197116 NG_030591 Homo sapiens | GGGTAGACTTATCAA |
| NO: 3037 | cholecystokinin B receptor | GGCACTTGTGGATGT |
| | (CCKBR), RefSeqGene on chromosome 11 | ACCCCAGCAGGTGCT |
| | | ATCTCCCATCCTTCT |
| SEQ ID | GI 291575141 NG_016810 Homo sapiens | AGTTAACCGAGAGAG |
| NO: 3038 | nuclear receptor coactivator 3 | CGAGCATCTACCTCA |
| | (NCOA3), RefSeqGene on chromosome 20 | CTGGCAGGATCTGGG |
| | | ATTCCCAAATGGAAT |
| SEQ ID | GI 215598755 NG_009072 Homo sapiens | TCTTTCCCCAGCCCT |
| NO: 3039 | von Willebrand factor | TCCAGTGATTAAAAG |
| | (VWF), RefSeqGene on chromosome 12 | CCATGCAGACGGATA |
| | | AGCAGTCTGTGATGG |
| SEQ ID | GI 284172478 NM_052946 Homo sapiens | GGGCAAACCTGGAAA |
| NO: 3040 | nitric oxide synthase trafficking | TTAGCTATGCCAAAG |
| | (NOSTRIN), transcript variant 1, mRNA | GACTTCAGAAACTGG |
| | | CAAGCAAGCTGAGCA |
| SEQ ID | GI 748585188 NM_004040 Homo sapiens | CTGTACAGAGAATAC |
| NO: 3041 | ras homolog family member B | ACCTGCCCCTGTATA |
| | (RHOB), mRNA | TCLTTTTTTCCCCTC |
| | | CCCTLLCTCCCAGTG |
| SEQ ID | GI 32187524 AY324387 Homo sapiens | TGGAGGACCTCCGCT |
| NO: 3042 | glutathione S-transferase pi | GCAAATACATCTCCC |
| | (GSTP1) gene, complete cds | TCATCTACACCAACT |
| | | ATGTGAGCATCTGCA |
| SEQ ID | GI 27501935 AY207429 Homo sapiens | ACTCCAAAGACCCTG |
| NO: 3043 | interleukin 11 | GATCTCAAATTCCAA |
| | (ILH) gene, complete cds | CTTCTAGCTCTGAGA |
| | | CTCCAGCCCTCACCC |
| SEQ ID | GI 21914605 AY130302 Homo sapiens | CAAATGCGAAAGAGT |
| NO: 3044 | truncated recombination | GGGAGATGTAAGAGG |
| | activating gene 1 | AGCGTCGAATGAGGG |
| | (RAG1) gene, complete cds | CAGCACAGAACAGTG |
| SEQ ID | GI 228008299 NG_011964 Homo sapiens | TAAGGTCAGTGGGCC |
| NO: 3045 | arginase 2 | AAAACGAAAAGAAAG |
| | (ARG2), RefSeqGene on chromosome 14 | GTGAATGGCTTGCAG |
| | | GGTTTTGCTGGAGTT |
| SEQ ID | GI 283945491 NG_016362 Homo sapiens | CTTGAAGGATGAGCT |
| NO: 3046 | C-X3-C motif chemokine receptor 1 | GACATCTCGCTCAGG |
| | (CX3CR1), RefSeqGene on chromosome 3 | GCCAAATAACCGACT |
| | | TGCTTACTGCTTGCT |
| SEQ ID | GI 193794846 NG_008174 Homo sapiens | GAGAGGTGTCGGTGG |
| NO: 3047 | fructose-bisphosphatase 1 | GCCTTTTTTCTTTTC |
| | (FBP1), RefSeqGene on chromosome 9 | AACTCTTGTGTCAAC |
| | | GTCAAGCCCCTCCTA |
| SEQ ID | GI 594591631 NG_034042 Homo sapiens | TCCATCAGAAGCTGT |
| NO: 3048 | mitogen-activated protein kinase 11 | AGGTGGGTCATTCTA |
| | (MAPK11), RefSeqGene on chromosome 22 | GCCATCATGCCAGCA |
| | | CAGATCTGTCTTCCT |
| SEQ ID | GI 1024336758 NG_046923 Homo sapiens | CAGTGCAGGCACCCT |
| NO: 3049 | zinc fingers and homeoboxes 3 | GGGAGCTAAATGTTA |
| | (ZHX3), RefSeqGene on chromosome 20 | CTGTATGTACCAGCA |
| | | GGGCTTTGTGAGAAA |
| SEQ ID | GI 1134787083 NM_004833 Homo sapiens | CTTCTGTGGCTGCTA |
| NO: 3050 | absent in melanoma 2 | GTGAGAACCCAAACC |
| | (AIM2), transcript variant 1, mRNA | AGCTCAGCCAATTAG |
| | | AGCTCCAGTTGTCAC |
| SEQ ID | GI 10798850 AF084559 Homo sapiens | AGGGTGTCCTGAGGT |
| NO: 3051 | fatty acid desaturase 2 | CCAAGATTCTGGAGC |
| | (FADS2) mRNA, complete cds | AATCTGACCCTTCTC |
| | | CAAAGGCTCTGTTAT |
| SEQ ID | GI 296841050 NM_138733 Homo sapiens | AATTGTGAAAGCCAC |
| NO: 3052 | phosphoglycerate kinase 2 | TTCCAAGGGCTGCAT |
| | (PGK2), mRNA | CACTGTTATAGGGGG |
| | | TGGAGACACTGCTAC |
| SEQ ID | GI 109809760 NM_014445 Homo sapiens | GCCCCCGAAGAGAAG |
| NO: 3053 | stress associated | GCGTCTGTAGGACCC |
| | endoplasmic reticulum protein 1 | TGGTTATTGGCTCTC |
| | (SERP1), mRNA | TTCATTTTTGTTGTC |
| SEQ ID | GI 27357272 AY195619 Homo sapiens | GAATCCTTCAGGGCA |
| NO: 3054 | interleukin 10 receptor, alpha | TGGTTTGGAAGGCCA |
| | (IL10RA) gene, complete cds | GGTAGGGATTCGCAG |
| | | AAACCTAGACACATC |
| SEQ ID | GI 13447389 AF361105 Homo sapiens | CAGACTTACAAGCCT |
| NO: 3055 | interleukin 9 | TGAAGCCGGGAAGCA |
| | (IL9) gene, complete cds | CCCGTTGAAAAGAAC |
| | | ATTCAGAGCCGACTA |
| SEQ ID | GI 342672038 NG_029624 Homo sapiens | TGAAATCCTTTTGGA |
| NO: 3056 | NFKB inhibitor beta | TGGTTTTCCCATCCC |
| | (NFKBIB), RefSeqGene on chromosome 19 | CACAGACTCACAGGC |
| | | ATGGCTGATCCGTAT |
| SEQ ID | GI 574957093 NM_001252 Homo sapiens | CACCAACCTCACTGG |
| NO: 3057 | CD70 molecule | GACACTTTTGCCTTC |
| | (CD70), transcript variant 1, mRNA | CCGAAACACTGATGA |
| | | GACCTTCTTTGGAGT |
| SEQ ID | GI 130509310 NM_022073 Homo sapiens | AACAAGAATTGGGAT |
| NO: 3058 | egl-9 family hypoxia inducible factor 3 | GCCAAGCTACATGGT |
| | (EGLN3), transcript variant 1, mRNA | GGGATCCTGCGGATA |
| | | TTTCCAGAGGGGAAA |
| SEQ ID | GI 194018480 NM_001945 Homo sapiens | CTTGGTAACTGATTA |
| NO: 3059 | heparin binding EGF like growth factor | CCTGCCAATTGCTAC |
| | (HBEGF), mRNA | CGAGAAGGTTGGAGG |
| | | TGGGGAAGGCTTTGT |
| SEQ ID | GI 666637974 NM_005922 Homo sapiens | GGAGTACTGCGATGA |
| NO: 3060 | mitogen-activated protein | GGGGACTTTAGAAGA |
| | kinase kinase kinase 4 | GGTGTCAAGGCTGGG |
| | (MAP3K4), transcript variant 1, mRNA | ACTTCAGGAACATGT |
| SEQ ID | GI 11342663 NM_002463 Homo sapiens | AGAGAAGAATCCTTA |
| NO: 3061 | MX dynamin like GTPase 2 | AGGAGAGAATTTACC |
| | (MX2), mRNA | GGCTCACTCAGGCGC |
| | | GACACGCACTCTGTC |
| SEQ ID | GI 42794610 NM_012088 Homo sapiens | CCCTCACACTACCTG |
| NO: 3062 | 6-phosphogluconolactonase | TCCTGAATGCAGCAC |
| | (PGLS), mRNA | GAACTGTCATCTTTG |
| | | TGGCAACTGGAGAAG |
| SEQ ID | GI 27368251 AY196903 Homo sapiens | TGGTGGCAGCCAGTA |
| NO: 3063 | interleukin 1 receptor antagonist | GGCTGGTCTGCTCCT |
| | (ILIRN) gene, complete cds | TCCTCTCTATTTCAT |
| | | ATGTGTATGAAGGCA |
| SEQ ID | GI 209447058 NG_008718 Homo sapiens | AGCTTGAGTCAGGAC |
| NO: 3064 | apurinic/apyrimidinic | CCTTAATTAAGATCC |
| | endodeoxyribonuclease 1 | TCAATTGGCTGGAGG |
| | (APEX1), RefSeqGene on chromosome 14 | GCAGATCTCGCGAGT |
| SEQ ID | GI 341865533 NG_029560 Homo sapiens | GCCAGAAAACAGGGA |
| NO: 3065 | aquaporin 4 | AAGAGGCTGAGAAAC |
| | (AQP4), RefSeqGene on chromosome 18 | CGTGGTAACCAAGTT |
| | | TTGCTGGCACTTTGT |
| SEQ ID | GI 269954682 NG_015989 Homo sapiens | TCTCTGGAATTGTTT |
| NO: 3066 | C-C motif chemokine ligand 26 | TCAGGGCCGTCTCAG |
| | (CCL26), RefSeqGene on chromosome 7 | TCTCATAAAAGGGGA |
| | | TCAGGCAGGAGGAGT |
| SEQ ID | GI 345441766 NG_029866 Homo sapiens | GTTACTTGTCCTGAT |
| NO: 3067 | DnaJ heat shock protein family | CACTCAGCCTCACTC |
| | (Hsp40) member A3 | AGCTGTTCCCTCACT |
| | (DNAJA3), RefSeqGene on chromosome [symbol] | CAGCCAGGATGTCTT |
| SEQ ID | GI 723428434 NG_041793 Homo sapiens | AGTAGGACCCAGGCA |
| NO: 3068 | inhibitor of nuclear factor | GTAGGTTTTACTGAG |
| | kappa B kinase subunit beta | GGAACGGACATCCTG |
| | (IKBKB), RefSeqGene on chromosome [symbol] | TTGCCTTTCTCACTC |
| SEQ ID | GI 215820636 NG_009079 Homo sapiens | CCACAACACAGAGAT |
| NO: 3069 | malonyl-CoA decarboxylase | GGGCTTGATCTGTCG |
| | (MLYCD), RefSeqGene on chromosome 16 | CACATTGGAGGCCTG |
| | | GGATTTATCTTCTCC |
| SEQ ID | GI 289802979 NG_016616 Homo sapiens | GGTTTCCAGGGGGCG |
| NO: 3070 | phosphorylase kinase | TGTGACTTGTCAAAG |
| | catalytic subunit gamma 2 | ACTAAGGATTTACAA |
| | (PHKG2), RefSeqGene on chromosome 16 | GGGGACAGGCAGAAA |
| SEQ ID | GI 340138935 NG_029446 Homo sapiens | TGAATCCTATCCTTA |
| NO: 3071 | PYD and CARD domain containing | GGAATCACCAAACAA |
| | (PYCARD), RefSeqGene on chromosome 16 | CCACTTTCCAACCTC |
| | | ACTGCCCCACCAGGC |
| SEQ ID | GI 332800978 NM_001206950 Homo sapiens | AGGAGGTACAGAAGC |
| NO: 3072 | solute carrier family 16 member 3 | CGGCAACGCTTGCTA |
| | (SLC16A3), transcript variant 1, mRNA | TTTATTTTACAAACT |
| | | GGACTGGCTCAGGCA |
| SEQ ID | GI 209977034 NM_021995 Homo sapiens | ATGCTCTGCGTCACT |
| NO: 3073 | urotensin 2 | TCTGCTCGGACTCAT |
| | (UTS2), transcript variant 1, mRNA | AAATCCACGTCTCTT |
| | | TGCTTTGGCCACTTC |
| SEQ ID | GI 114731580 DQ993361 Homo sapiens | AGAAAAGAGTGCTCC |
| NO: 3074 | glutathione S-transferase A3 | AAATAGGAGAAACAG |
| | (GSTA3) gene, complete cds | CATGCAGAGCCTTGG |
| | | GCTAGGGAGAAAGGC |
| SEQ ID | GI 410991940 NG_032977 Homo sapiens | AGGAGGGAAAGAAGG |
| NO: 3075 | interleukin 12 receptor subunit beta 2 | ACATGAGGCAATTCT |
| | (IL12RB2), RefSeqGene on chromosome 1 | TCAGAGCCGAGCTGT |
| | | CGTTAAGAGGGTCTT |
| SEQ ID | GI 335892864 NG_029105 Homo sapiens | ACACCCTGAAACAAG |
| NO: 3076 | interleukin 1 receptor accessory protein | TCCGAGTCAGGCCAG |
| | (ILIRAP), RefSeqGene on chromosome 3 | ACAAGCATCCCCTGA |
| | | AAAATACTCCCTTTG |
| SEQ ID | GI 33333853 AF546700 Homo sapiens | TCGCCACATCCTTAT |
| NO: 3077 | androgen regulated a/b hydrolase II | GGGCACCGGAAGTTC |
| | (ABHD2) mRNA, complete cds | ATCACTATGTCTGAT |
| | | GGAGCCACTTCTACA |
| SEQ ID | GI 31321969 AY114157 Homo sapiens | CCAGTTGCAGGTGGC |
| NO: 3078 | inhibitor of kappaB kinase gamma | CTATCACCAGCTCTT |
| | (IKBKG) mRNA, complete cds | CCAAGAATACGACAA |
| | | CCACATCAAGAGCAG |
| SEQ ID | GI 1036029324 AHO13155 Homo sapiens | AATGTCTTTTCCAGG |
| NO: 3079 | chromosome 19 poliovirus | TGGCTTTTTTGGAAT |
| | receptor related 2 | CAGGATGCTGCGAAG |
| | (PVRL2) gene, | CTGCCTACGTTGCAT |
| SEQ ID | GI 1168024008 KY497359 Homo sapiens | CAGCCCCACACCAAG |
| NO: 3080 | HLA-E | AGTTTTTGGAGGTCT |
| | (HLA-E) gene, complete cds | GACTCCAGCTTTTCT |
| | | CAGTCACTCAGCATC |
| SEQ ID | GI 302129699 NG_012063 Homo sapiens | TTTCATTTCATTCCT |
| NO: 3081 | enolase 3 | TGGTCGGGGAGGGGG |
| | (ENO3), RefSeqGene on chromosome 17 | GATAAGGCTACAAAG |
| | | GGGAGAGGAGAGAAT |
| SEQ ID | GI 194595503 NG_008308 Homo sapiens | ACTAGTCCCTGGGCT |
| NO: 3082 | gap junction protein alpha 1 | GTCATCAAATGTACC |
| | (GJA1), RefSeqGene on chromosome 6 | CATGATACCGTGGTA |
| | | CCATCTAGCTGGTGC |
| SEQ ID | GI 237858739 NG_012110 Homo sapiens | AGGTCCCATGGAAAA |
| NO: 3083 | programmed cell death 1 | TGACCACAGGCAATG |
| | (PDCD1), RefSeqGene on chromosome 2 | AGAAAGCCATAGAGT |
| | | GCTGCCTGTGAGATC |
| SEQ ID | GI 300796511 NG_023374 Homo sapiens | GATGGGCTGTCTCCC |
| NO: 3084 | retinoid X receptor beta | CATTTCTAACCTGAG |
| | (RXRB), RefSeqGene on chromosome 6 | TGGTTCCTCCTCTGA |
| | | TTCCATGGACCTTCT |
| SEQ ID | GI 226693341 NG_011851 Homo sapiens | CCTGACCTTACTTTC |
| NO: 3085 | synuclein alpha | CTCCCTCCCTGTTTC |
| | (SNCA), RefSeqGene on chromosome 4 | CTCTTTGTGGTGTTT |
| | | CCACTGGCCAAACTC |
| SEQ ID | GI 260656026 NM_005518 Homo sapiens | TAGAACACAGCTTCC |
| NO: 3086 | 3-hydroxy-3-methylglutaryl-CoA synthase 2 | CCCAGCCCACTTCCC |
| | (HMGCS2), transcript variant 1, mRNA | TGTTCTAAAGACACC |
| | | ACATAGACAGAGAGC |
| SEQ ID | GI 1049010946 AH002554 Homo sapiens | TGTTGAACCTTTTTA |
| NO: 3087 | actin prepeptide | GGGGGTGATGGTGGG |
| | (ACTA2) gene, complete cds | AATGGGACAAAAAGA |
| | | CAGCTACGTGGGTCA |
| SEQ ID | GI 167887711 EF445033 Homo sapiens | AGGCATGCTGATTCT |
| NO: 3088 | signal transducing adapter molecule 1 | CAGTCCAGTGTTCTT |
| | (STAM) gene, complete cds, | TTCGCTGCCCGAGTC |
| | alternatively spliced | TGCCTTCTTTGTTAG |
| SEQ ID | GI 1150273800 NG_052917 Homo sapiens | CATTTCAGGAAATGA |
| NO: 3089 | adenosine A1 receptor | ACAGGAAGTGCAAAG |
| | (ADORAl), RefSeqGene on chromosome 1 | CCCCTGAGGTAGGAG |
| | | AGTGCCCCAGGTATG |
| SEQ ID | GI 269784608 NG_015894 Homo sapiens | TTGAGACATATGTAT |
| NO: 3090 | apolipoprotein A5 | CCAACTGCCAGAACA |
| | (APOA5), RefSeqGene on chromosome 11 | TCTCCAGTGGACAGC |
| | | CTTTGGGCACAAGGC |
| SEQ ID | GI 906847382 NG_042271 Homo sapiens | GGTTTTGTGCTGCTT |
| NO: 3091 | calcium voltage- | TCTGTCTTTTTTGGA |
| | gated channel subunit alphal B | AGTCGGGAGGGGCAC |
| | (CACNA1B), RefSeqGene on chromosome 9 | ACAAACCAGAAGGAA |
| SEQ ID | GI 224809239 NG_011444 Homo sapiens | GCTGCCTAGAGGCTG |
| NO: 3092 | fatty acid binding protein 2 | ACTCAACTGAAATCA |
| | (FABP2), RefSeqGene on chromosome 4 | TGGCGTTTGACAGCA |
| | | CTTGGAAGGTAGACC |
| SEQ ID | GI 1216866539 NG_012872 Homo sapiens | TGTAAACTGGGAGTG |
| NO: 3093 | gelsolin | GCGGTACCTCCCTTG |
| | (GSN), RefSeqGene on chromosome 9 | CAGATACACTCACCT |
| | | TGAAAGCTGCAAAAC |
| SEQ ID | GI 345091009 NG_029843 Homo sapiens | GGCAAGTGGTGTGGT |
| NO: 3094 | nuclear receptor subfamily 1 | TCTAGCCGTGAAGAC |
| | group H member 4 | ACAAAAGCTTCCAAA |
| | (NR1H4), RefSeqGene on chromosome 12 | ACCAAAGTCAGGCAG |
| SEQ ID | GI 206725550 NM_004958 Homo sapiens | CCAAGAGTGGTGCAG |
| NO: 3095 | mechanistic target of rapamycin | GAAGTACATGAAATC |
| | (MTOR), mRNA | AGGGAATGTCAAGGA |
| | | CCTCACCCAAGCCTG |
| SEQ ID | GI 31559181 AY310878 Homo sapiens | AATCAGCCTCTCCTT |
| NO: 3096 | glutathione peroxidase 3 | GGAGTCAGTCTAAAT |
| | (plasma) | GGATGTGAAGCCACT |
| | (GPX3) gene, complete cds | TCGTCCAAGTCCCCT |
| SEQ ID | GI 51988875 AY744675 Homo sapiens | GTCAGGACTGAAAAG |
| NO: 3097 | matrix metalloproteinase 10 | GGCTCATATTCTAGA |
| | (stromelysin 2) | AGGGGCAGCAGAGAT |
| | (MMP10) gene, complete cds | GAAGCCTTTGGCAGC |
| SEQ ID | GI 284520137 NG_016421 Homo sapiens | ATTTTCCTAAGCATC |
| NO: 3098 | adrenoceptor beta 2 | CAGCTATTGGTGTGA |
| | (ADRB2), RefSeqGene on chromosome 5 | GGGCATGCTCTGGCA |
| | | CCATGGAAGCTTACT |
| SEQ ID | GI 237858769 NG_012123 Homo sapiens | AGACCCAGAATCTGG |
| NO: 3099 | C-C motif chemokine ligand 2 | TCTGTGCTTCATTCA |
| | (CCL2), RefSeqGene on chromosome 17 | CCTTAGCTTCCAGAG |
| | | ACGGTGACTCTGCAG |
| SEQ ID | GI 297307113 NG_021395 Homo sapiens | GCAGGGCTGGGATGC |
| NO: 3100 | erythropoietin receptor | ATGCCAGACTAGACC |
| | (EPOR), RefSeqGene on chromosome 19 | CAGACTCTTCGTTAA |
| | | CATTTTCTGCTCTTG |
| SEQ ID | GI 381140032 NG_032168 Homo sapiens | AGTTGCTGGTTGGGA |
| NO: 3101 | glycerol-3-phosphate dehydrogenase 1 | TTATTGGGCTTCACC |
| | (GPD1), RefSeqGene on chromosome 12 | ACTGGATCTTAAGAG |
| | | CCCTTTCCCGACTTG |
| SEQ ID | GI 1063759771 NG_051548 Homo sapiens | ATAGTTTCACTGCCC |
| NO: 3102 | mitogen-activated protein | CCTGGGTTCTCCCAA |
| | kinase-activated protein kinase 3 | CGCTGCTCCTTACCT |
| | (MAPKAPK3), RefSeqGene on [symbol] | AGAAGGAAAGAATCT |
| SEQ ID | GI 291219867 NG_016781 Homo sapiens | TTGCTGCTGCCTATT |
| NO: 3103 | pyruvate dehydrogenase alpha 1 | GTAGATCTGGGAAGG |
| | (PDHA1), RefSeqGene on chromosome X | TAAGGCTCTAAAGCC |
| | | CTCTGGGCTAGTGAC |
| SEQ ID | GI 345842406 NM_005849 Homo sapiens | CTGCTCAGCAAGGAA |
| NO: 3104 | immunoglobulin superfamily member 6 | CTGCGGAGCTTCCTG |
| | (IGSF6), mRNA | ACAGCTCTTGTATCA |
| | | CTGCTCTCTGTCTAT |
| SEQ ID | GI 411147377 NM_014339 Homo sapiens | CCAATGAACGTTTGT |
| NO: 3105 | interleukin 17 receptor A | GCGTCAGGTTTGAGT |
| | (IL17RA), transcript variant 1, mRNA | TTCTGTCCAAACTGA |
| | | GGCATCACCACAGGC |
| SEQ ID | GI 1150273800 NG_052917 Homo sapiens | GGTACCTGGAAGCCA |
| NO: 3106 | adenosine A1 receptor | AGTGTAGACAGTCTA |
| | (ADORAl), RefSeqGene on chromosome 1 | CCAAGGAGGGTGGAC |
| | | AAATGGGTGAAGTGA |
| SEQ ID | GI 269954733 NG_016014 Homo sapiens | TCTTAATGATGCCCC |
| NO: 3107 | membrane spanning 4-domains A2 | TGTGTCTAGGGTATG |
| | (MS4A2), RefSeqGene on chromosome 11 | CCAGGTCCTGTCTGC |
| | | CATTGCCTGAGATAG |
| SEQ ID | GI 38261972 NM_024551 Homo sapiens | CCCCGGAATGTACAG |
| NO: 3108 | adiponectin receptor 2 | TGTCTTGGTGCACCA |
| | (ADIPOR2), mRNA | AGATGCCTTCTAAAG |
| | | GCTGACATACCTTGG |
| SEQ ID | GI 197304767 NM_014674 Homo sapiens | ACCCAGACCATGCCA |
| NO: 3109 | ER degradation enhancing | AAGTCCAGTCTGAAA |
| | alpha-mannosidase like protein 1 | TGAAAGGGGACAGAA |
| | (EDEM1), mRNA | GTCTTGCTGTCCATG |
| SEQ ID | GI 523498705 NM_024923 Homo sapiens | TCCTTGAGATGGCAG |
| NO: 3110 | nucleoporin 210 | CAGGAGTCATATTTT |
| | (NUP210), mRNA | CTGTGTGTGTGTTTC |
| | | GGAAAGCCGCTGTGT |
| SEQ ID | GI 1036032346 AH001409 Homo sapiens | GGGTGTATTGGCTTG |
| NO: 3111 | alcohol dehydrogenase 6 | GGAGTAGAAGAAGGG |
| | (ADH6) gene, complete cds | TCGTCCCTGCTGCAG |
| | | AAGCTGTATACTGAT |
| SEQ ID | GI 189409117 NG_007972 Homo sapiens | AATCATTCCTGCCCA |
| NO: 3112 | cytochrome P450 family | CCAGTATGCCGTGTC |
| | 2 subfamily C member 8 | AATTTACTATTCCCA |
| | (CYP2C8), RefSeqGene | TGGCAACACCCAGGA |
| | on chromosome 10 [symbol] | |
| SEQ ID | GI 197116377 NG_008385 Homo sapiens | GGGGCAATCTAGGAT |
| NO: 3113 | cytochrome P450 family 2 | AATACAGCAGCCCCA |
| | subfamily C member 9 | AAGCAGCAGAGAGTC |
| | (CYP2C9), RefSeqGene on | AAGTGCCTTCCTTTT |
| | chromosome 10 [symbol] | |
| SEQ ID | GI 347658934 NG_030028 Homo sapiens | CCCCAGAGGAAGTAA |
| NO: 3114 | mitochondrial antiviral signaling protein | GGTCTTCATCATCCA |
| | (MAVS), RefSeqGene on chromosome 20 | GTGGCCTGGACTCAA |
| | | CTCCAGATGTCAGTG |
| SEQ ID | GI 1026191100 NG_047066 Homo sapiens | GCAAGGAGGCTTTTC |
| NO: 3115 | proliferating cell nuclear antigen | CTCCCGGTAGGCTTG |
| | (PCNA), RefSeqGene on chromosome 20 | ATTTGCATTTCACTT |
| | | TCACTTTCGTGGCTG |
| SEQ ID | GI 218749810 NG_009188 Homo sapiens | CTCTTCAGCATCCTT |
| NO: 3116 | phosphoglycerate dehydrogenase | GAACCACTTGCTGGT |
| | (PHGDH), RefSeqGene on chromosome 1 | GGTACTTACATGGTT |
| | | ACATGTGGCCGGGAC |
| SEQ ID | GI 429535866 NG_033016 Homo sapiens | ACAGGGATGACAGTG |
| NO: 3117 | receptor interacting | TGGGTAGACCAAGGC |
| | serine/threonine kinase 2 | AGACAGACTTCATAG |
| | (RIPK2), RefSeqGene on chromosome 8 | GACATTGCACCAGAA |
| SEQ ID | GI 356461041 NM_014329 Homo sapiens | GCTGTGGAGGGCAGC |
| NO: 3118 | enhancer of mRNA decapping 4 | ATGAAAGAGAACATC |
| | (EDC4), mRNA | TCCAAGCTGCTCAAG |
| | | TCCAAGAACTTGACT |
| SEQ ID | GI 62122910 NM_001014336 Homo sapiens | TACAGTCCCTCTCGA |
| NO: 3119 | interleukin 31 | AGATGCTTTTGAAAG |
| | (IL31), mRNA | ATGTGGAGGAAGAGA |
| | | AGGGCGTGCTCGTGT |
| SEQ ID | GI 315434201 NM_020429 Homo sapiens | AATCCCCCATTCCAA |
| NO: 3120 | SMAD specific E3 ubiquitin | AAGTCCAGGCCAAAT |
| | protein ligase 1 | GGTGGGCTTAGCCTC |
| | (SMURF1), transcript variant 1, mRNA | TTTGAAAAGTTCTGC |
| SEQ ID | GI 1049010967 AH003492 Homo sapiens | AGGTTGTAGGGTTTC |
| NO: 3121 | beta-fibrinogen | TTCAGTGCCCGTGGT |
| | (FGB) gene, complete cds | CATCGACCCCTTGAC |
| | | AAGAAGAGAGAAGAG |
| SEQ ID | GI 14423570 AF387519 Homo sapiens | AGGGAAACACTTGCA |
| NO: 3122 | interleukin 22 | TCTCAAGGTGGAAAG |
| | (IL22) gene, complete cds | GATAGAGGTGGTGTT |
| | | TTGTGGGCTCCTGTG |
| SEQ ID | GI 169234676 NG_007118 Homo sapiens | TCTGCCTGGTTTCTG |
| NO: 3123 | ATP binding cassette | ACCCTTTGTCTCTTT |
| | subfamily B member 4 | CGGTTCTCTTGCTTG |
| | (ABCB4), RefSeqGene on chromosome 7 | CCCTGTGTGTTTGAT |
| SEQ ID | GI 353703739 NG_030372 Homo sapiens | TGCCTGTCTGTTACA |
| NO: 3124 | CD83 molecule | CTGGAGGAGAGAAGA |
| | (CD83), RefSeqGene on chromosome 6 | ATGAGCCTACGCTGA |
| | | AGATGGCATCCTGTG |
| SEQ ID | GI 1025608669 NG_047000 Homo sapiens | CGTGGTCAGACAACT |
| NO: 3125 | prostaglandin E receptor 4 | GAAAATCTGGAGAAG |
| | (PTGER4), RefSeqGene on chromosome 5 | GTCCATTCCAGGCAA |
| | | AGGGAAGAACCTGGG |
| SEQ ID | GI 312261284 NM_016441 Homo sapiens | ACAAGGCTGCACCTT |
| NO: 3126 | cysteine rich transmembrane | GAACTGTCCCTTCGG |
| | BMP regulator 1 | TTTCCTTACTGATGC |
| | (CRIM1), mRNA | CCAAAACTGTGAGAT |
| SEQ ID | GI 325651826 NM_001443 Homo sapiens | AGCTCTATTGCCACC |
| NO: 3127 | fatty acid binding protein 1 | ATGAGTTTCTCCGGC |
| | (FABP1), mRNA | AAGTACCAACTGCAG |
| | | AGCCAGGAAAACTTT |
| SEQ ID | GI 1036031503 AHO11685 Homo sapiens | AGAGATCTCTTCGAT |
| NO: 3128 | chromosome 1 AMPK beta-2 subunit | TTCTTTCAGGCCTGA |
| | (PRKAB2) gene, complete cds | GGCTTTTGTGAAATG |
| | | CGTCAGCCCCCTGTG |
| SEQ ID | GI 1220516002 NM_023003 Homo sapiens | TGGGCACATGATCTG |
| NO: 3129 | transmembrane 6 superfamily member 1 | CTACTGGGATGGCTC |
| | (TM6SF1), transcript variant 1, mRNA | TGCTCATTATCTGAT |
| | | GTACCTGGTGATGGT |
| SEQ ID | GI 124001557 NM_152586 Homo sapiens | CACACTACCAGAAAG |
| NO: 3130 | ubiquitin specific peptidase 54 | AAGCAAGGGCCTTCA |
| | (USP54), transcript variant 1, mRNA | GGTTCCTCACACTCA |
| | | GTCCTGGAGTGATCT |
| SEQ ID | GI 21105788 AF512686 Homo sapiens | TCCTTCAATGCATGG |
| NO: 3131 | interleukin 12B | CCCATAACCATTAAA |
| | (natural killer cell stimulatory | GCAGAGGTCTTCTCA |
| | factor 2, cytotoxic lymphocyte | CTGTGCGGTCCCATC |
| | maturation factor [symbol] | |
| SEQ ID | GI 577019603 NG_033914 Homo sapiens | AAGGAGGATCAAGAC |
| NO: 3132 | CD207 molecule | CCGTAATCCGGCATA |
| | (CD207), RefSeqGene on chromosome 2 | ACACCCTGGGGTTTT |
| | | CCACTCTTTCAGAGA |
| SEQ ID | GI 1042161084 NG_046982 Homo sapiens | TGCTCAGCTACTGGC |
| NO: 3133 | ficolin 1 | ACGACTTCTAAGCTC |
| | (FCN1), RefSeqGene on chromosome 9 | TGTGTCCCTCCACCT |
| | | TCTCACCTGAAAATT |
| SEQ ID | GI 345525392 NG_029921 Homo sapiens | AGGGGGAAGTGAGAA |
| NO: 3134 | major histocompatibility | CGTGACAGAGAAGCA |
| | complex, class II, DR beta 1 | AGTGCTGGGTTTGGT |
| | (HLA-DRB1), RefSeqGene on chromoso [symbol] | GGAGTTGATATTTGC |
| SEQ ID | GI 338827642 NG_029226 Homo sapiens | TCCATCTACCTACTC |
| NO: 3135 | nuclear factor of activated T-cells 1 | TCCATCTACCCATCA |
| | (NFATC1), RefSeqGene on chromosome 18 | TCCCTTCACCCCCCG |
| | | TCCATCATGATCCAT |
| SEQ ID | GI 318064850 NG_028074 Homo sapiens | AAAGCCACTGAAATT |
| NO: 3136 | ras related dexamethasone induced 1 | TGATCTCCTCCTTCA |
| | (RASD1), RefSeqGene on chromosome 17 | CACATTCCCAGGTCC |
| | | CCAATATGCCACCCA |
| SEQ ID | GI 83267865 NM_001037494 Homo sapiens | AAGGAATTTGACAAG |
| NO: 3137 | dynein light chain LC8-type 1 | AAGTACAATCCCACC |
| | (DYNLL1), transcript variant 1, mRNA | TGGCATTGCATCGTG |
| | | GGGAGGAACTTCGGT |
| SEQ ID | GI 20379137 AF498982 Homo sapiens | CTTTGGGCTACAGGA |
| NO: 3138 | 5-hydroxytryptamine receptor 2A | CGATTCGAAGGTCTT |
| | (HTR2A) mRNA, complete cds | TAAGGAGGGGAGTTG |
| | | CTTACTCGCCGATGA |
| SEQ ID | GI 169790829 NM_001754 Homo sapiens | GCGTGGTAAAAGAAA |
| NO: 3139 | runt related transcription factor 1 | TCATTGAGTCCCCCG |
| | (RUNX1), transcript variant 1, mRNA | CCTTCAGAAGAGGGT |
| | | GCATTTTCAGGAGGA |
| SEQ ID | GI 18765742 NM_003098 Homo sapiens | AACTTCAGCGAGGCC |
| NO: 3140 | syntrophin alpha 1 | AAACACATGTCCTTG |
| | (SNTA1), mRNA | AAGATGGCATATGTC |
| | | TCGAAGAGGTGCACC |
| SEQ ID | GI 72255578 NM_021103 Homo sapiens | CCCCCCCCCAATCGG |
| NO: 3141 | thymosin beta 10 | ACTGCCAAATTCTCC |
| | (TMSB10), mRNA | GGTTTGCCCCGGGAT |
| | | ATTATAGAAAATTAT |
| SEQ ID | GI 170560906 EU567146 Homo sapiens | GGGAGATGATCATGG |
| NO: 3142 | solute carrier family 22 | GAGGAACCATGTGAA |
| | (organic anion transporter), member 6 | AGGAGTTGGGGGGAA |
| | (SLC22A6) gene, complete cds | GGCAATTTAAGGGTT |
| SEQ ID | GI 569026730 NG_012887 Homo sapiens | ATTTACAGCCAAGGA |
| NO: 3143 | cystatin C | ACATGGCGTGGAGGG |
| | (CST3), RefSeqGene on chromosome 20 | GTGGTGTTAGCAGGT |
| | | GGAAAGTTACTAAGC |
| SEQ ID | GI 374088072 NG_032029 Homo sapiens | TTTGGAGTGTTTCCC |
| NO: 3144 | MAP kinase interacting | TGATCCAGAGCTGGG |
| | serine/threonine kinase 1 | AGGTCCAGAACAGAG |
| | (MKNK1), RefSeqGene on chromosome 1 | GGTTAAGGATGGAAA |
| SEQ ID | GI 209447066 NG_008725 Homo sapiens | GTGCAACACATATGA |
| NO: 3145 | paraoxonase 2 | GCATGAAGGGGCCCA |
| | (PON2), RefSeqGene on chromosome 7 | TGCCAAATGTATAGT |
| | | GCAGCAGGAGCAAAG |
| SEQ ID | GI 302058260 NG_023447 Homo sapiens | CCGCCACCAAAATGT |
| NO: 3146 | resistin | AGATTTTCCTGAAAA |
| | (RETN), RefSeqGene on chromosome 19 | CCCTTACAGGGAAGA |
| | | CCACCACCCTCGAGG |
| SEQ ID | GI 1154345445 NG_033859 Homo sapiens | ATCCTTGCTCCAAGA |
| NO: 3147 | sodium voltage-gated | GACTCAGTACAAACC |
| | channel alpha subunit 11 | TCAAACACAAAGCTG |
| | (SCN11A), RefSeqGene on chromosome 3 | TGCTCTGCATGGCCA |
| SEQ ID | GI 212549746 NG_008982 Homo sapiens | GTTTGTCCTTGTAGG |
| NO: 3148 | solute carrier family 22 member 5 | CATGGGCCAGATCTC |
| | (SLC22A5), RefSeqGene on chromosome 5 | CAACTATGTGGCAGC |
| | | ATTTGTCCTGGGTAT |
| SEQ ID | GI 254039651 NG_012413 Homo sapiens | ACTTTGCCGTTGAAG |
| NO: 3149 | vimentin | CTGCTAACTACCAAG |
| | (VIM), RefSeqGene on chromosome 10 | ACACTATTGGCCGCC |
| | | TGCAGGATGAGATTC |
| SEQ ID | GI 66933013 NM_020139 Homo sapiens | TAGGGCCCACTTCCT |
| NO: 3150 | 3-hydroxybutyrate dehydrogenase 2 | GGTTTGCAGATGGTC |
| | (BDH2), mRNA | CTCTTCTTGCTGTAT |
| | | CCTCACATAGCAAGA |
| SEQ ID | GI 874507471 NM_005928 Homo sapiens | TCCTCACTGTCCTGT |
| NO: 3151 | milk fat globule-EGF factor 8 protein | TTTCTTAGGCACTGA |
| | (MFGE8), transcript variant 1, mRNA | GGGATCTGAGTAGGT |
| | | CTGGGATGGACAGGA |
| SEQ ID | GI 195963400 NM_005359 Homo sapiens | TCCCCTAAATTCAGA |
| NO: 3152 | SMAD family member 4 | GGAATGCAGCTATGC |
| | (SMAD4), mRNA | CAGAAGCCAGAGAAG |
| | | AGCCACTCGTAGCTT |
| SEQ ID | GI 193788644 NG_008170 Homo sapiens | CATTGGCAACCCAGC |
| NO: 3153 | branched chain amino acid transaminase 1 | ACCCAGTTAAATTCC |
| | (BCAT1), RefSeqGene on chromosome 12 | CCTTGTCACTGTTTC |
| | | CACATTGTCCCCATC |
| SEQ ID | GI 1024846747 NG_047015 Homo sapiens | AGCTGGAGCCCAGCT |
| NO: 3154 | bone gamma-carboxyglutamate protein | CTGCTTGAACCTATT |
| | (BGLAP), RefSeqGene on chromosome 1 | TTAGGTCTCTGATCC |
| | | CCGCTTCCTCTTTAG |
| SEQ ID | GI 747813982 NG_007933 Homo sapiens | GAGATGTCGAGGAGC |
| NO: 3155 | cytochrome P450 family | CAGAAGAGGTTCAGG |
| | 2 subfamily S member 1 | AGTTGCTGATTGCAG |
| | (CYP2S1), RefSeqGene | TATGAGGCACAGTGA |
| | on chromosome 19 [symbol] | |
| SEQ ID | GI 291084846 NG_016762 Homo sapiens | AAACATCCAGCTTCT |
| NO: 3156 | pyruvate dehydrogenase kinase 3 | TCCTGCTCACTGACA |
| | (PDK3), RefSeqGene on chromosome X | ACTGCCACCAATTAT |
| | | CGCTCCACTTCCAGG |
| SEQ ID | GI 315434256 NM_001926 Homo sapiens | GCAAGCTCAAGTCTT |
| NO: 3157 | defensin alpha 6 | AGAGCTTTGGGCTCA |
| | (DEFA6), mRNA | ACAAGGGCTTTCACT |
| | | TGCCATTGCAGAAGG |
| SEQ ID | GI 545746351 NM_006228 Homo sapiens | CATGAAAGTCCTGCT |
| NO: 3158 | prepronociceptin | TTGTGACCTGCTGCT |
| | (PNOC), transcript variant 1, mRNA | GCTCAGTCTCTTCTC |
| | | CAGTGTGTTCAGCAG |
| SEQ ID | GI 8133099 AF266756 Homo sapiens | GGCAGCTTCCTTGAA |
| NO: 3159 | sphingosine kinase | CCATTATGCTGGCTA |
| | (SPHK1) mRNA, complete cds | TGAGCAGGTCACCAA |
| | | TGAAGACCTCCTGAC |
| SEQ ID | GI 350606318 NG_009014 Homo sapiens | CCTGCCTGATCTGTG |
| NO: 3160 | androgen receptor | GAGATGAAGCTTCTG |
| | (AR), RefSeqGene on chromosome X | GGTGTCACTATGGAG |
| | | CTCTCACATGTGGAA |
| SEQ ID | GI 224809308 NG_011502 Homo sapiens | CCAGGAGACCCACAG |
| NO: 3161 | cytotoxic T-lymphocyte | GTATGACCTTCTAGG |
| | associated protein 4 | AAGCTCCAGTTCGAT |
| | (CTLA4), RefSeqGene on chromosome 2 | GGGCCCAATTCTTAC |
| SEQ ID | GI 1043261406 NG_051107 Homo sapiens | AAACTGTTTGAGCAG |
| NO: 3162 | vacuole membrane protein 1 | GAGTGAGTCACAGTG |
| | (VMP1), RefSeqGene on chromosome 17 | AAACCAGCTTCCCTG |
| | | TAACCACAGGGCTTG |
| SEQ ID | GI 211971007 NM_001136538 Homo sapiens | GTCAGGGTGGACTCA |
| NO: 3163 | acyl-CoA dehydrogenase family member 10 | ATCTTTCTGGTTCTC |
| | (ACAD10), transcript variant 1, mRNA | CACAGAAGACGTCTC |
| | | TGCAAGAAGCCTGGA |
| SEQ ID | GI 169234615 NM_002514 Homo sapiens | GTGATGGTCATTGGG |
| NO: 3164 | nephroblastoma overexpressed | ACCTGCACCTGTCAC |
| | (NOV), mRNA | ACCAACTGTCCTAAG |
| | | AACAATGAGGCCTTC |
| SEQ ID | GI 45934429 AY585238 Homo sapiens | CGCAGTTGCAGTCAG |
| NO: 3165 | creatine kinase, muscle | ACACAGACAAGGAGA |
| | (CKM) gene, complete cds | GTGGGAGAAAGGGAG |
| | | ACAGGAAGAGAAACA |
| SEQ ID | GI 7637751 AF250378 Homo sapiens | TACCTTTAATGGCTC |
| NO: 3166 | E2F transcription factor 4 | CTTGAGGGCCACCAG |
| | (E2F4) gene, complete cds | ATAAGATCTGAACTC |
| | | CTGAGCCTGGCATGT |
| SEQ ID | GI 308522736 NG_027815 Homo sapiens | AGGGTAGACAGGCAA |
| NO: 3167 | transketolase | TAACCACCTAATGTC |
| | (TKT), RefSeqGene on chromosome 3 | AGGTGGCAAGCATGA |
| | | GTGAGGGGAAGAAGA |
| SEQ ID | GI 574289185 NG_033890 Homo sapiens | CTACCCTCAAGTTCT |
| NO: 3168 | transient receptor potential | ACAGGTTCACCAGAT |
| | cation channel subfamily A member 1 | GCCCCAGGAGGTCCT |
| | (TRPAl), RefSeqGene on [symbol] | AGATGCATTGATGGG |
| SEQ ID | GI 88999590 NM_197947 Homo sapiens | TCATGCTCAACAATG |
| NO: 3169 | C-type lectin domain containing 7A | CCATTGAAGTGCACG |
| | (CLEC7A), transcript variant 1, mRNA | GTGTGTTGCCACGAT |
| | | TTGACCCTCAACTTC |
| SEQ ID | GI 225579058 NM_197965 Homo sapiens | ACCTGCCCAGCCATT |
| NO: 3170 | solute carrier family 10 member 6 | GTTGCCGATGTTCAT |
| | (SLC10A6), mRNA | TTGTAATGCTGCCTT |
| | | AAGGAGATGAGGAGA |
| SEQ ID | GI 315365058 HQ38416O Homo sapiens | TTTTGGGAAGCCCTC |
| NO: 3171 | fatty acid binding protein 4, adipocyte | AGGACACTTACACAG |
| | (FABP4) gene, complete cds | GCTTGTGAATCAATC |
| | | ACATGCTCAGCAGGT |
| SEQ ID | GI 8101110 AF268380 Homo sapiens | CCACCCCCACTGTGT |
| NO: 3172 | melanoma-associated delayed | TTGGCGCTTAATAGG |
| | early response protein | TTGGAGAAGAGGACC |
| | (NAB2) gene, complete cds | TGAGCAACTGAAATC |
| SEQ ID | GI 37953284 AY438977 Homo sapiens | AAAACAGGGTCCACC |
| NO: 3173 | phospholipase A2, group IB | TTGGCTCAGTCCTCT |
| | (pancreas) | CCTTTCATCCCTCTC |
| | (PLA2G1B) gene, complete cds | CAGGCAAAAACAAAG |
| SEQ ID | GI 255652920 NG_012644 Homo sapiens | TCACAGGTGCTTCCC |
| NO: 3174 | deleted in malignant brain tumors 1 | CAAACTTGAGCCTTC |
| | (DMBT1), RefSeqGene on chromosome 10 | ATAAACCCAGGCAGA |
| | | ACTGCTTCTTTGACT |
| SEQ ID | GI 257743484 NG_012879 Homo sapiens | GTCTGTGGAAGCTGA |
| NO: 3175 | serpin family A member 3 | GGGAGAGCACCAAAT |
| | (SERPINA3), RefSeqGene on chromosome 14 | TCAGTTTGGGAAGTC |
| | | AGGGAAGGCTTCTTG |
| SEQ ID | GI 215277008 NM_000851 Homo sapiens | CTTAGTGGATGGGTG |
| NO: 3176 | glutathione S-transferase mu 5 | TGTGTGTGTGTGTGT |
| | (GSTM5), mRNA | TGGGGGTGGTGATCA |
| | | GGCAGGTTCATAAAT |
| SEQ ID | GI 59853224 NM_001206 Homo sapiens | TTGCTGGGACTGTAG |
| NO: 3177 | Kruppel like factor 9 | CGTTTGCAGGAAGTC |
| | (KLF9), mRNA | ACTTAACTGTTTGGG |
| | | AGCTGGAAAACCGAA |
| SEQ ID | GI 1159261125 NM_001349413 Homo sapiens | AATGAAATGATGTCC |
| NO: 3178 | kelch like family member 24 | CCAAGGACTAGGCCA |
| | (KLHL24), transcript variant 1, mRNA | CGCAGGTCCACTGGC |
| | | TATTCTGAGGTGATA |
| SEQ ID | GI 207028588 NM_021970 Homo sapiens | ACAATGCTCCAGAGC |
| NO: 3179 | late endosomal/lysosomal adaptor, | ATGCTTTGCGACCTG |
| | MAPK and MTOR activator 3 | GTTTCTTATCCACTT |
| | (LAMTOR3), transcript vari [symbol] | TTGCCCTTGCAACAG |
| SEQ ID | GI 299758475 NM_001190737 Homo sapiens | AATCCCGACCAGAAG |
| NO: 3180 | nuclear factor 1 B | GGTAAGATTAGGAGA |
| | (NFIB), transcript variant 1, mRNA | ATCGACTGCCTGCGA |
| | | CAGGCAGACAAAGTC |
| SEQ ID | GI 13430063 AF253322 Homo sapiens | GAACACGTGACTTCT |
| NO: 3181 | cytochrome P450 | CACAAGGCCTTGATT |
| | (CYP1A1) and cytochrome P450 | TCTTCATTCACAGCC |
| | (CYP1A2) genes, complete cds | CGGGAGGGGATAAGC |
| SEQ ID | GI 117606493 EF064721 Homo sapiens | AATACACAGAGATAC |
| NO: 3182 | interleukin 7 | GGGAGTCTTGGCAGA |
| | (IL7) gene, complete cds | GAAGCTGCTCAGGCA |
| | | CATGTTGGAGAACCA |
| SEQ ID | GI 226492652 NG_011814 Homo sapiens | CCGTCTTTTTTCTCC |
| NO: 3183 | C-X-C motif chemokine receptor 1 | TGTGTCCCCAGTGAC |
| | (CXCR1), RefSeqGene on chromosome 2 | TATTTTCTGCCCTTG |
| | | GGGCTGATTTTCCCT |
| SEQ ID | GI 594591642 NG_034033 Homo sapiens | AAAGGGGAGAAATTA |
| NO: 3184 | phosphofructokinase, liver type | GGGTTTTCCGGAACC |
| | (PFKL), RefSeqGene on chromosome 21 | CCCACACATTTGTGG |
| | | TTGGGAAAGACTCCT |
| SEQ ID | GI 298160932 NG_021435 Homo sapiens | AATTTTCCATCCTCT |
| NO: 3185 | vesicle associated membrane protein 7 | GACCCCCTCACTCTG |
| | (VAMP7), RefSeqGene on chromosome X and Y | TTCATTGGCCACAAA |
| | | TCCCCACTGGTCTTG |
| SEQ ID | GI 574957130 NM_001815 Homo sapiens | GCTTCTACTTGTCCA |
| NO: 3186 | carcinoembryonic antigen | CAATCTGCCCCAGCA |
| | related cell adhesion molecule 3 | TCTTTTTGGCTACAG |
| | (CEACAM3), transcript variant 1 [symbol] | CTGGTACAAAGGGGA |
| SEQ ID | GI 221316649 NM_005232 Homo sapiens | TGGGTGGAGTGAACA |
| NO: 3187 | EPH receptor A1 | GCAACAGATACTGAA |
| | (EPHAl), mRNA | TGGGACACCCCTGTA |
| | | CATGTACCAGGACTG |
| SEQ ID | GI 385137136 NM_012340 Homo sapiens | CTTTTGAAGGCAAGG |
| NO: 3188 | nuclear factor of activated T-cells 2 | AGTTCTCAGAGCAAC |
| | (NFATC2), transcript variant 1, mRNA | CAAAGGAACGTGACC |
| | | CAAGAGCCCAGCTTA |
| SEQ ID | GI 769468216 NM_003246 Homo sapiens | TGTGGACCAGAGAGA |
| NO: 3189 | thrombospondin 1 | CACTGATATGGATGG |
| | (THBS1), mRNA | GGTTGGAGATCAGTG |
| | | TGACAATTGCCCCTT |
| SEQ ID | GI 32815083 AY340073 Homo sapiens | GTGAGACCTGAGCAC |
| NO: 3190 | glutamate decarboxylase 2 | ATCACCTGACTTCCC |
| | (pancreatic islets and brain, 65 kDa) | TGACTGTTTCCCAGT |
| | (GAD2) gene, complete cds | TTCGCAACAGCAATT |
| SEQ ID | GI 190194409 NG_008004 Homo sapiens | TAATGGGTAGTGGGG |
| NO: 3191 | activin A receptor type 1 | ACTGAGGAACTATGG |
| | (ACVR1), RefSeqGene on chromosome 2 | AATGATGGTGAGAGC |
| | | CAAGGGGGCAATGAA |
| SEQ ID | GI 662236863 NG_034192 Homo sapiens | GTAGGATTGTCTGCA |
| NO: 3192 | diacylglycerol O-acyltransferase 1 | GTGAGCTTTGGGAAG |
| | (DGAT1), RefSeqGene on chromosome 8 | CACCACCCTTTCCCG |
| | | ACTCCTGTTTTCATC |
| SEQ ID | GI 1024336756 NG_046908 Homo sapiens | TTCACCTGGGGCTCT |
| NO: 3193 | YYl transcription factor | GCCAGACGGTTACCA |
| | (YYl), RefSeqGene on chromosome 14 | CATTACCAGGACTCT |
| | | TGGTACAAATGAGAA |
| SEQ ID | GI 342307092 NM_001716 Homo sapiens | AGGGCTCACCGTGGC |
| NO: 3194 | C-X-C motif chemokine receptor 5 | TAAGAGTGTCCTAGG |
| | (CXCR5), transcript variant 1, mRNA | AGTATCCTCATTTGG |
| | | GGTAGCTAGAGGAAC |
| SEQ ID | GI 188497624 NM_012205 Homo sapiens | CATCATCCAGGAGTT |
| NO: 3195 | 3-hydroxyanthranilate 3,4-dioxygenase | CTTCAGCTCTGAGCA |
| | (HAAQ), mRNA | GTACAGAACAGGAAA |
| | | GCCCATCCCTGACCA |
| SEQ ID | GI 38016923 NM_006253 Homo sapiens | ACTGAGGCCACACAT |
| NO: 3196 | protein kinase AMP-activated | CATTTCCAGTCATCT |
| | non-catalytic subunit beta 1 | GTGTGTTTTTAAGGC |
| | (PRKAB1), mRNA | CAGCCACTTGTCCCT |
| SEQ ID | GI 21397157 AF517525 Homo sapiens | AGTCTCTTGGCCCTA |
| NO: 3197 | cyclin D3 | GTTGTGTTCCCATAC |
| | (CCND3) gene, complete cds | TAGGGAGTGTCTTGT |
| | | CTATTCCCGGGACCT |
| SEQ ID | GI 51537346 AY728138 Homo sapiens | ATCTGTGACCGCTTC |
| NO: 3198 | chemokine | TACCCCAATGACTTG |
| | (C-X-C motif) receptor 4 | TGGGTGGTTGTGTTC |
| | (CXCR4) gene, complete cds | CAGTTTCAGCACATC |
| SEQ ID | GI 32140476 AY316305 Homo sapiens | ACGCAGTCTTCTCCA |
| NO: 3199 | glutathione transferase zeta 1 | CTAGTGTTGACCCAC |
| | (maleylacetoacetate isomerase) | CCAAGTTTTTTTTAC |
| | (GSTZ1) gene, complete cds | CCTCAGCTTGCCAGG |
| SEQ ID | GI 238776831 NG_012261 Homo sapiens | AAGCATCCAGTGGAA |
| NO: 3200 | aldehyde dehydrogenase 8 family member A1 | TCCCACCTGGTGTTT |
| | (ALDH8A1), RefSeqGene on chromosome 6 | ACTGTGGGCAGAGGT |
| | | GAATCTGTGGTTTTT |
| SEQ ID | GI 297515475 NG_021404 Homo sapiens | TGAGAGGCTCCGAGA |
| NO: 3201 | matrix metallopeptidase 13 | AATGCAGTCTTTCTT |
| | (MMP13), RefSeqGene on chromosome 11 | CGGCTTAGAGGTGAC |
| | | TGGCAAACTTGACGA |
| SEQ ID | GI 291084780 NG_016747 Homo sapiens | TGCCTAATGCTTGTA |
| NO: 3202 | PPARG coactivator 1 beta | TGTGTGGAAGGCAAG |
| | (PPARGC1B), RefSeqGene on chromosome 5 | GTGCTCACTGTTCTG |
| | | GAGGCAGCCTATTTC |
| SEQ ID | GI 299829203 NG_023197 Homo sapiens | TCAGGAAACTAACAA |
| NO: 3203 | parathyroid hormone like hormone | GGTGGAGACGTACAA |
| | (PTHLH), RefSeqGene on chromosome 12 | AGAGCAGCCGCTCAA |
| | | GACACCTGGGAAGAA |
| SEQ ID | GI 229577384 NG_011990 Homo sapiens | GAGGAATTGTGGGAG |
| NO: 3204 | SMAD family member 3 | GAAAAGCACTGGGCA |
| | (SMAD3), RefSeqGene on chromosome 15 | GAAGGTCTCAGTCAA |
| | | ATGCACCTGCAGTTA |
| SEQ ID | GI 17059625 AJ420108 Homo sapiens | TCTGTGCTGGTCGGG |
| NO: 3205 | mRNA for F-box only 32 | AACATTAACATGTGG |
| | (FBXO32 gene) | GTGTATCGGATGGAG |
| | | ACGATTCTCCACTGG |
| SEQ ID | GI 206597516 NM_001859 Homo sapiens | GGCGTGGCCTTATCG |
| NO: 3206 | solute carrier family 31 member 1 | ATTGCAGTGGGAAGT |
| | (SLC31A1), mRNA | TGTTGAAGACTTGAA |
| | | GACGTGATTCCTGCT |
| SEQ ID | GI 117606493 EF064721 Homo sapiens | CAAAGACGTGCCCAC |
| NO: 3207 | interleukin 7 | TGGGTGAATGGGTAT |
| | (IL7) gene, complete cds | GTCGACATGGTCCTA |
| | | GTCTGAGTGTAGGTG |
| SEQ ID | GI 237820638 NG_012034 Homo sapiens | AAAGAATTTCAGGCC |
| NO: 3208 | ABL proto-oncogene 1, non- | GAGGGAACCAGGATG |
| | receptor tyrosine kinase | CAGAAACCTGAGGCA |
| | (ABL1), RefSeqGene on chromosome 9 | GAGCTTGCTAGTTTC |
| SEQ ID | GI 238018065 NG_012195 Homo sapiens | TGTGCCAAAGAATCT |
| NO: 3209 | fatty acid amide hydrolase | CACGATTGCTGCCTA |
| | (FAAH), RefSeqGene on chromosome 1 | TTGGAATGCGAAAAC |
| | | GCAAGCGTGACAACC |
| SEQ ID | GI 307133693 NG_027728 Homo sapiens | TGTCAACTGGCCCTG |
| NO: 3210 | interferon regulatory factor 4 | TGTAAAGCCACGTCA |
| | (IRF4), RefSeqGene on chromosome 6 | CTGTTTCTGTAGAGA |
| | | GCATGACACGTCAGA |
| SEQ ID | GI 692314725 NM_002416 Homo sapiens | TAGTGAGAAAGGGTC |
| NO: 3211 | C-X-C motif chemokine ligand 9 | GCTGTTCCTGCATCA |
| | (CXCL9), mRNA | GCACCAACCAAGGGA |
| | | CTATCCACCTACAAT |
| SEQ ID | GI 299758401 NM_000143 Homo sapiens | GTGTGACAGAACGCA |
| NO: 3212 | fumarate hydratase | TGCCAACCCCAGTTA |
| | (FH), mRNA | TTAAAGCTTTTGGCA |
| | | TCTTGAAGCGAGCGG |
| SEQ ID | GI 153082754 NM_001547 Homo sapiens | AACAAGCAGATGAAG |
| NO: 3213 | interferon induced protein with | ACTCTGAGAGGGGTT |
| | tetratricopeptide repeats 2 | TGGAGTCTGGAAGCC |
| | (IFIT2), mRNA | TCATCCCTTCAGCAT |
| SEQ ID | GI 117606541 EF064745 Homo sapiens | TTCAAATGCCTCTTC |
| NO: 3214 | chemokine | CCTCCTAGGCAGGAT |
| | (C-X3-C motif) ligand 1 | GACTCAGTACCTTTC |
| | (CX3CL1) gene, complete cds | AGCAACTGCTCTCGG |
| SEQ ID | GI 7417326 AF237581 Homo sapiens | AGTCACAGGGTCATG |
| NO: 3215 | migration inhibitory factor- | GAGGGAATAAACTGG |
| | related protein 14 variant P | AGAGCGTTTGGTATG |
| | (S100A9) gene, complete cds | TGCTCAGTGTCTGCT |
| SEQ ID | GI 751130526 NG_041830 Homo sapiens | AGTTCCTCTTGAGGT |
| NO: 3216 | DnaJ heat shock protein family | GTTTGACTGTTGGCC |
| | (Hsp40) member C3 | AAAGTCTTCCCTTGG |
| | (DNAJC3), RefSeqGene on chromosome | TTGCTTCTCACACGG |
| SEQ ID | GI 350606382 NG_030335 Homo sapiens | CGGTTTGAGAAAAGA |
| NO: 3217 | SEL1L ERAD E3 ligase adaptor subunit | AAGGGCAGGCACACC |
| | (SELIL), RefSeqGene on chromosome 14 | AAGTCACTGCTCTGC |
| | | TACTCAGTTGGAACA |
| SEQ ID | GI 305410826 NG_027551 Homo sapiens | TTTCCAGTGTCCCTG |
| NO: 3218 | transient receptor potential | GGTCACTCTCTTGGT |
| | cation channel subfamily M member 4 | CTCCTTTGAGCCTTT |
| | (TRPM4), RefSeqGene on [symbol] | TGTACTCTCGCCTTC |
| SEQ ID | GI 1013417860 NG_046847 Homo sapiens | GGAGGTCATTCATGC |
| NO: 3219 | ubiquitin specific peptidase 7 | CCGTCAAGGTTGTTG |
| | (USP7), RefSeqGene on chromosome 16 | TGAGACTGGAATCGC |
| | | CAGGCACATCTAAAG |
| SEQ ID | GI 371875636 NM_182919 Homo sapiens | GCCTTCGACATTCTA |
| NO: 3220 | toll like receptor adaptor molecule 1 | GGTGCAGCAGGCCAG |
| | (TICAM1), mRNA | GACAAGCTCTTGTAT |
| | | CTGAAGCACAAACTG |
| SEQ ID | GI 256220780 NG_012741 Homo sapiens | GTCACGTACACTGCC |
| NO: 3221 | very low density lipoprotein receptor | AGGTAGCATAGGTTG |
| | (VLDLR), RefSeqGene on chromosome 9 | GCACAGCTTCTAAGG |
| | | AGTGGAGCTGATGAA |
| SEQ ID | GI 806607 M90696 Homo sapiens | TGCACTCATACGATC |
| NO: 3222 | cathepsin S | TGGGCATGAACCACC |
| | (CTSS) mRNA, complete cds | TGGGAGACATGACCA |
| | | GTGAAGAAGTGATGT |
| SEQ ID | GI 55953136 NM_002163 Homo sapiens | GGCCCGCATCATGAT |
| NO: 3223 | interferon regulatory factor 8 | TAAAGAATGTGGATC |
| | (IRF8), mRNA | CCTCTGTCTGGGGTG |
| | | GGATGCCTTACTTTG |
| SEQ ID | GI 166235119 NG_007149 Homo sapiens | GCTTTCTGGCTTCAC |
| NO: 3224 | B-cell CLL/lymphoma 6 | GAACAATTTCTCTCT |
| | (BCL6), RefSeqGene on chromosome 3 | CCTCGGCTCATGGGG |
| | | CAGTATGAAGGCATG |
| SEQ ID | GI 363807289 NG_031933 Homo sapiens | GATTTGGACATGTGG |
| NO: 3225 | BMP binding endothelial regulator | GCCCTGCACATTCAT |
| | (BMPER), RefSeqGene on chromosome 7 | ACAGCCTTCTGTGCT |
| | | TGGGACTAGAAGTCC |
| SEQ ID | GI 226492652 NG_011814 Homo sapiens | GAGCTGAGGATTTCT |
| NO: 3226 | C-X-C motif chemokine receptor 1 | GCTGCCCGCTTCCTC |
| | (CXCR1), RefSeqGene on chromosome 2 | TCTTGTGACCACCAC |
| | | TCATACATGGAGTTA |
| SEQ ID | GI 223718000 NG_009785 Homo sapiens | TCTTGCCTGGCCACT |
| NO: 3227 | guanidinoacetate N-methyltransferase | CTTGCAAATCCAACT |
| | (GAMT), RefSeqGene on chromosome 19 | TTCGGATAGAGGGAG |
| | | GGGGAGAGAAAAGTA |
| SEQ ID | GI 354725887 NG_030444 Homo sapiens | GTCAGGAACTCTAGC |
| NO: 3228 | hepatitis A virus cellular receptor 2 | AGTTGAGCCCAGCAA |
| | (HAVCR2), RefSeqGene on chromosome 5 | TCTGTGTTTTCGCAA |
| | | GGCTTCCCAGTGATT |
| SEQ ID | GI 237858687 NG_012088 Homo sapiens | CATTCTATCCATCCA |
| NO: 3229 | interleukin 10 | TAGGTGCCTGCCTTC |
| | (IL10), RefSeqGene on chromosome 1 | TCACTTCCCTCTCTT |
| | | CATGGGCTCTTGCCT |
| SEQ ID | GI 430768625 NG_033035 Homo sapiens | TGAATGGCACCACCA |
| NO: 3230 | kelch like family member 40 | TCCATTCAGTTGCTC |
| | (KLHL40), RefSeqGene on chromosome 3 | AGGGTATAAGCCTTG |
| | | GTGCCATCTTGGATT |
| SEQ ID | GI 574290111 NG_033893 Homo sapiens | GTCGTGATACAGCCC |
| NO: 3231 | MALTI paracaspase | AGATTCACAGGTGGG |
| | (MALT1), RefSeqGene on chromosome 18 | GGTGACTGTACTACA |
| | | CAAGGGCAAGGATAC |
| SEQ ID | GI 209870107 NG_008768 Homo sapiens | AGTGGAAGCAGCAGT |
| NO: 3232 | propionyl-CoA carboxylase alpha subunit | GGTGATCTGTAGTGG |
| | (PCCA), RefSeqGene on chromosome 13 | TGTCTACAGTGTGCT |
| | | GGTTCTGGTTGAGTT |
| SEQ ID | GI 215422398 NG_009053 Homo sapiens | AAGTCTGTTGTTTGC |
| NO: 3233 | protein activator of interferon | TGTCCCTACTCCTCA |
| | induced protein kinase EIF2AK2 | TGTGTTCTTGGCCAG |
| | (PRKRA), RefSeqGene on chro [symbol] | CTGTGGGTTTGGAAG |
| SEQ ID | GI 117606535 EF064742 Homo sapiens | GTTGGATCCGTGGAT |
| NO: 3234 | chemokine | ATGCTAGGAGCGGAG |
| | (C-X-C motif) ligand 16 | AAGAGGATTTTTCAG |
| | (CXCL16) gene, complete cds | GGCTGAGGATGGGAG |
| SEQ ID | GI 50234988 AY675320 Homo sapiens | TATTGGCTAACACCG |
| NO: 3235 | RAD21 homolog | CAACTCTCAAAGACC |
| | (S. pombe) | CTCGCAAGAGAATCA |
| | (RAD21) gene, complete cds | CCTTTGCGCTTGCTC |
| SEQ ID | GI 757813200 NG_012843 Homo sapiens | CTTCAGGGGALTGCT |
| NO: 3236 | lipin 1 | CCTATTTTTGTTGCT |
| | (LPIN1), RefSeqGene on chromosome 2 | CCTTAAAGCCTTACT |
| | | GTGGTTCCCCAGGGC |
| SEQ ID | GI 227908850 NG_011958 Homo sapiens | TCATGGTCCTTGAAA |
| NO: 3237 | noggin | GGTAGAGTGTCTCAC |
| | (NOG), RefSeqGene on chromosome 17 | CCAAGGTCGCACAGC |
| | | TGGTAGATTGCAAGT |
| SEQ ID | GI 1024846751 NG_047008 Homo sapiens | CGGGATCAAAGTGGG |
| NO: 3238 | pyruvate dehydrogenase kinase 4 | TCTACACCAGTGCTG |
| | (PDK4), RefSeqGene on chromosome 7 | CTTCCTGAATGTTTG |
| | | TGTGTGAACCCTTGT |
| SEQ ID | GI 340523097 NG_029467 Homo sapiens | TTCCCCACCCCAGAG |
| NO: 3239 | protein tyrosine kinase 2 | CACAAGGTTTAAAGA |
| | (PTK2), RefSeqGene on chromosome 8 | CTAGAACGTGGACTC |
| | | TTTTCACCCTCAGCT |
| SEQ ID | GI 37675281 NM_020664 Homo sapiens | AGGTCCGCCCCTCTG |
| NO: 3240 | 2,4-dienoyl-CoA reductase 2 | TCTCTGCACCACCTG |
| | (DECR2), mRNA | TTTGCATAAACACAC |
| | | TTTGCTACAATCTTG |
| SEQ ID | GI 194018480 NM_001945 Homo sapiens | CACACCAAACAAGGA |
| NO: 3241 | heparin binding EGF like growth factor | GGAGCACGGGAAAAG |
| | (HBEGF), mRNA | AAAGAAGAAAGGCAA |
| | | GGGGCTAGGGAAGAA |
| SEQ ID | GI 523425747 NM_004599 Homo sapiens | GTGTTGTGTGTATGT |
| NO: 3242 | sterol regulatory element | CCTGTGCCTTTTCTC |
| | binding transcription factor 2 | ACTATTGTTTGGGTG |
| | (SREBF2), transcript variant 1, | TGGGAGGGGGTGGTT |
| | mRN [symbol] | |
| SEQ ID | GI 40787172 AY513239 Homo sapiens | CCAGGCTCCATCCAT |
| NO: 3243 | complement component 3 | TGATAGGAGCCTTGC |
| | (C3) gene, complete cds | TCTATTGTTCTACAG |
| | | GGCCTTTGCACATGC |
| SEQ ID | GI 57790279 AY865620 Homo sapiens | CAGCATTTCCTCACC |
| NO: 3244 | signal transducer and activator | CGTTTCACATGAGCA |
| | of transcription 1, 91 kDa | GATTTGACACGTTGC |
| | (STAT1) gene, complete cds | TCTGTCCCCAGACTT |
| SEQ ID | GI 270289740 NG_015895 Homo sapiens | ATTCCCTGCCCTACA |
| NO: 3245 | four and a half LIM domains 1 | ACCCAGTGGGCCCTC |
| | (FHL1), RefSeqGene on chromosome X | TTTTGACCCTTGCAT |
| | | TTGTGGTATCATTAG |
| SEQ ID | GI 678246479 NG_034239 Homo sapiens | CTTCTCAGGATGCCA |
| NO: 3246 | lipopolysaccharide binding protein | CCGGGGGTCATTAGA |
| | (LBP), RefSeqGene on chromosome 20 | TTCATGGGTTCTGAT |
| | | GCAGACTGCAAAACC |
| SEQ ID | GI 1027250682 NG_047124 Homo sapiens | AGGGCCTTGCAAGGT |
| NO: 3247 | solute carrier family 27 member 5 | CCTGGTCATATCTAT |
| | (SLC27A5), RefSeqGene on chromosome 19 | TCTCACTGCCATTTG |
| | | TCTGTCCGTCTTCCA |
| SEQ ID | GI 292658763 NM_014143 Homo sapiens | GGCCCAAGCACTGAA |
| NO: 3248 | CD274 molecule | AATGGAACCTGGCGA |
| | (CD274), transcript variant 1, mRNA | AAGCAGAGGAGGAGA |
| | | ATGAAGAAAGATGGA |
| SEQ ID | GI 269914182 NM_178859 Homo sapiens | GCTGTGGTGGTCATT |
| NO: 3249 | solute carrier family 51 beta subunit | ATAAGCATGGTCCTC |
| | (SLC51B), mRNA | CTGGGAAGAAGCATC |
| | | CAGGCAAGCAGAAAA |
| SEQ ID | GI 343488502 NG_029727 Homo sapiens | GTCGTAGGGAGGGTT |
| NO: 3250 | platelet derived growth factor subunit A | GTAAACTGGTTGAGG |
| | (PDGFA), RefSeqGene on chromosome 7 | TCAGTTCTCATTGGG |
| | | TAAGCATCCCTCCGG |
| SEQ ID | GI 221316649 NM_005232 Homo sapiens | CTGGCTGCCAGAAAC |
| NO: 3251 | EPH receptor A1 | ATCTTGGTGAATCAA |
| | (EPHAl), mRNA | AACCTGTGCTGCAAG |
| | | GTGTCTGACTTTGGC |
| SEQ ID | GI 523498473 NM_006332 Homo sapiens | GAGGAGTGCAAATTC |
| NO: 3252 | IFI30, lysosomal thiol reductase | AACAAGGTGGAGGCC |
| | (IFI30), mRNA | TGCGTGTTGGATGAA |
| | | CTTGACATGGAGCTA |
| SEQ ID | GI 24430203 NM_153480 Homo sapiens | GTCCAGAAAATTGTG |
| NO: 3253 | interleukin 17 receptor E | TCTGGGGGCCACACT |
| | (IL17RE), transcript variant 1, mRNA | GTAGAGCTGCCTTAT |
| | | GAATTCCTTCTGCCC |
| SEQ ID | GI 53759150 NM_005063 Homo sapiens | TTGTGCGCAAACACC |
| NO: 3254 | stearoyl-CoA desaturase | CAGCTGTCAAAGAGA |
| | (SCD), mRNA | AGGGGAGTACGCTAG |
| | | ACTTGTCTGACCTAG |
| SEQ ID | GI 960513892 NM_001317781 Homo sapiens | GATTGGTGGTGTGAA |
| NO: 3255 | sorting nexin 25 | AACCTTGGCATGTGG |
| | (SNX25), mRNA | AAAGCCTCCATCACC |
| | | AGTGGAGAGGTTACA |
| SEQ ID | GI 8248053 AF199441 Homo sapiens | TTGGGAGGCTGTTAG |
| NO: 3256 | gastrointestinal glutathione peroxidase | GAGGATTACAGTCAG |
| | (GPX2) gene, complete cds | GAAGCATCAATAGCA |
| | | CTGTGGGTACTGGGC |
| SEQ ID | GI 238776813 NG_012250 Homo sapiens | ACCTACAGATCACAG |
| NO: 3257 | aldehyde dehydrogenase 2 family | GGAAGCAGGAAGATC |
| | (mitochondrial) | TAACGGCTTCTCTGT |
| | (ALDH2), RefSeqGene on chromosome 12 [symbol] | CCCCCTTACAGGTCA |
| SEQ ID | GI 193794846 NG_008174 Homo sapiens | ATCATTTGGGGATCT |
| NO: 3258 | fructose-bisphosphatase 1 | TGGTAAGATGTGTGC |
| | (FBP1), RefSeqGene on chromosome 9 | CCTCCTTCCATAGCT |
| | | CTGGGACAGGTCCTG |
| SEQ ID | GI 255958254 NG_012690 Homo sapiens | AATAAGAAATGCCAG |
| NO: 3259 | flavin containing monooxygenase 3 | CATCCACCAGAAGCC |
| | (FMO3), RefSeqGene on chromosome 1 | AGAAGCGGCAAGGAA |
| | | TGGATTCTCTCCTGG |
| SEQ ID | GI 345525392 NG_029921 Homo sapiens | TTCTGCCCCAGCTTT |
| NO: 3260 | major histocompatibility complex, | GCAGGATGAAAAGCT |
| | class II, DR beta 1 | TTCCCTCCTGGCTGT |
| | (HLA-DRB1), RefSeqGene on | TATTCTTCCACAAGA |
| | chromoso [symbol] | |
| SEQ ID | GI 343403846 NG_029699 Homo sapiens | CTCTGTACAGTGGGA |
| NO: 3261 | protein kinase cAMP-activated | ATAACAGCAGCTCCC |
| | catalytic subunit alpha | ACCCCACAGGGTGAG |
| | (PRKACA), RefSeqGene on chromoson | AACGAAGCATAGAAA |
| SEQ ID | GI 300244554 NG_023330 Homo sapiens | AGAGTGTTCACATGA |
| NO: 3262 | SMAD family member 7 | CTGAACCTAGGGGAG |
| | (SMAD7), RefSeqGene on chromosome 18 | GCCAGTTGTGACTTG |
| | | TGGCTGTCAGAAGTC |
| SEQ ID | GI 255652922 NG_012646 Homo sapiens | GTTGAGTGTTAGATG |
| NO: 3263 | transforming growth factor beta induced | CAGAGAAGAGACACC |
| | (TGFBI), RefSeqGene on chromosome 5 | CCCCACCTCCCCGCA |
| | | TCACTTACAGGAATT |
| SEQ ID | GI 209447082 NG_008731 Homo sapiens | ACAAAGAAGAGGGAG |
| NO: 3264 | vitamin D receptor | ATGACAAATGGGTAG |
| | (VDR), RefSeqGene on chromosome 12 | GGCTGGGGAAGGGGA |
| | | ATCATAGCTTGGTGA |
| SEQ ID | GI 222080101 NM_022121 Homo sapiens | GAGAGTGATTGGAGG |
| NO: 3265 | PERP, TP53 apoptosis effector | TCTCCTTGCCTTGGC |
| | (PERP), mRNA | TGCTGTGTTCCAGAT |
| | | CATCTCCCTGGTAAT |
| SEQ ID | GI 339515664 NM_003943 Homo sapiens | GCATCTTTAGATGGA |
| NO: 3266 | starch binding domain 1 | TGGTCCTCAGTCCAG |
| | (STBD1), mRNA | TCCTTCCATTTTACA |
| | | GGCGAGGAGGCGGAA |
| SEQ ID | GI 21435968 AF518727 Homo sapiens | CTTGCTCGCACAGCT |
| NO: 3267 | cyclin El | GTTGGCAGGAGCTGT |
| | (CCNEl) gene, complete cds | CATGGATAATTTGCA |
| | | TGCCCAATTCTTTGT |
| SEQ ID | GI 9837432 AF287892 Homo sapiens | GTCCTCTAGGACCGT |
| NO: 3268 | sialic acid binding immunoglobulin- | GTGTGATTTCACTGC |
| | like lectin 8 long splice variant | ACAGATGGACTCTGA |
| | (Siglec8) gene, complete cds | CTTTGTGGCATCCCT |
| SEQ ID | GI 255652911 NG_012637 Homo sapiens | TAAGAGTGCAGGCTT |
| NO: 3269 | C-C motif chemokine receptor 5 | CCCGCATTCAAAATC |
| | (gene/pseudogene) | GGTTGCTTACTAGCT |
| | (CCR5), RefSeqGene on chromosome 3 | GTGTGGCTTTGAGCA |
| SEQ ID | GI 239787264 NG_012303 Homo sapiens | CTCATCTTCCTCCTC |
| NO: 3270 | colony stimulating factor 1 receptor | TCAGTTCCCTTCTGG |
| | (CSF1R), RefSeqGene on chromosome 5 | TCCTTTCTGGCCAGG |
| | | TCTCTGTCTTCCTCT |
| SEQ ID | GI 299758395 NG_011675 Homo sapiens | ATGGGTGTTTGGAAG |
| NO: 3271 | glial cell derived neurotrophic factor | GGAAGGGAAAAGGAA |
| | (GDNF), RefSeqGene on chromosome 5 | AGGGGGACATACTAG |
| | | GGAGTAGCATGGGAA |
| SEQ ID | GI 296010831 NG_021194 Homo sapiens | TGCTTTGATCTTGAG |
| NO: 3272 | interleukin 1 receptor associated kinase 3 | GCAGCCCCCTGTCAA |
| | (IRAK3), RefSeqGene on chromosome 12 | CTTGTAGTGAATTGT |
| | | GCCCTGGTTCTTCAG |
| SEQ ID | GI 1007399066 NG_029521 Homo sapiens | AGGCCATTCCCTATG |
| NO: 3273 | SGT1 homolog, MIS12 kinetochore | CTCTGGAGACCTACC |
| | complex assembly cochaperone | CCTTCACTCTTGCAA |
| | (SUGT1), RefSeqGene < | ATGCTTCTACCCTTC |
| SEQ ID | GI 542133069 NM_004335 Homo sapiens | TGTAAGCTTCTGCTG |
| NO: 3274 | bone marrow stromal cell antigen 2 | GGGATAGGAATTCTG |
| | (BST2), mRNA | GTGCTCCTGATCATC |
| | | GTGATTCTGGGGGTG |
| SEQ ID | GI 514052655 NM_001278549 Homo sapiens | GAAAACAGTTGGCCT |
| NO: 3275 | pyruvate dehydrogenase kinase 1 | GTAATCACAGAACCA |
| | (PDK1), transcript variant 1, mRNA | GCCACCCTTCGGCGT |
| | | CTACATGCATTGTCT |
| SEQ ID | GI 328751683 NG_028290 Homo sapiens | TGGAGAAAAACTTCA |
| NO: 3276 | acyl-CoA synthetase long | TGATGCAGAAATGTG |
| | chain family member 6 | CTATTGCCTGGCTGG |
| | (ACSL6), RefSeqGene on chromosome 5 | GGAGGGCAGACATCA |
| SEQ ID | GI 269784608 NG_015894 Homo sapiens | GGAGTGAAAATGAGG |
| NO: 3277 | apolipoprotein A5 | GCTGTGTACTTGAGG |
| | (APOA5), RefSeqGene on chromosome 11 | CTGGGATTGGGGAAG |
| | | GTAGTGATGAGGACA |
| SEQ ID | GI 1064244211 NG_051562 Homo sapiens | TTCTTGTCCCTCTGT |
| NO: 3278 | ChaC glutathione specific gamma- | CTGTCTGTCTATCTA |
| | glutamylcyclotransferase 1 | CTTGTCTGTCTGGGC |
| | (CHAC1), RefSeqGene on chro [symbol] | CACTCCTGCCTGTGT |
| SEQ ID | GI 225637493 NG_011688 Homo sapiens | ATGCACATTACAGGC |
| NO: 3279 | growth hormone receptor | ATGGTAAAAAGAGGC |
| | (GHR), RefSeqGene on chromosome 5 | TCTGGGAAGCATGTT |
| | | CGAGCTGCTCTGCTC |
| SEQ ID | GI 818213488 NG_042142 Homo sapiens | TTCCAGCATACGGCA |
| NO: 3280 | inositol 1,4,5-trisphosphate | TTCCTTTTCTCTCTT |
| | receptor type 2 | CACACCATGCTTCTC |
| | (ITPR2), RefSeqGene on chromosome 12 | AGAAAGGCCTTGGCC |
| SEQ ID | GI 308199420 NG_027788 Homo sapiens | TGTAAAGTAGCGTGC |
| NO: 3281 | MX dynamin like GTPase 1 | ATACAGGGATGGAAG |
| | (MX1), RefSeqGene on chromosome 21 | GGAATGTGGATGCCA |
| | | TTGTGCCAGCAAGTT |
| SEQ ID | GI 194394200 NG_008275 Homo sapiens | CCCTCCTAGCTGAGT |
| NO: 3282 | prokineticin 2 | AACCTCAGTCCAGGA |
| | (PROK2), RefSeqGene on chromosome 3 | CCTTTGCTTCACCTC |
| | | AAAAGGAAGCCACTT |
| SEQ ID | GI 346644679 NG_029975 Homo sapiens | GGCCACTTTCTCTTA |
| NO: 3283 | transforming growth factor alpha | TCCTACCCACCAGCC |
| | (TGFA), RefSeqGene on chromosome 2 | TGGCCCTCCTTTCTA |
| | | CAGCTGGTTCTTAAT |
| SEQ ID | GI 224809368 NG_011523 Homo sapiens | AGCAACTCTGAGCAG |
| NO: 3284 | TIR domain containing adaptor protein | TAGCCTCTTCCCCAT |
| | (TIRAP), RefSeqGene on chromosome 11 | TTAGCGACAATCTAG |
| | | GATTTCTTGGGGCCA |
| SEQ ID | GI 671744853 NG_034216 Homo sapiens | TGGTGATCAGTCAAC |
| NO: 3285 | vascular endothelial growth factor C | CCAGCCTTACTTTCC |
| | (VEGFC), RefSeqGene on chromosome 4 | TGGAGTGTTCATAGT |
| | | CTGCAGAGCACCAGG |
| SEQ ID | GI 81230486 NM_001037162 Homo sapiens | CTGTGCACGCTGTTT |
| NO: 3286 | acyl-CoA thioesterase 6 | TGGGTGAGGCAATAT |
| | (ACOT6), mRNA | TCTATGGAGGTGAGC |
| | | CAAAGGCTCACTCAA |
| SEQ ID | GI 169790843 NM_000239 Homo sapiens | GGCGTGAGCCACTGC |
| NO: 3287 | lysozyme | GCCCGGCCACATTCA |
| | (LYZ), mRNA | GTTCTTATCAAAGAA |
| | | ATAACCCAGACTTAA |
| SEQ ID | GI 1147566 X80590 H. sapiens | GGAAACCAGAAAGAT |
| NO: 3288 | PHKGI mRNA | CATGCGAGCTCTGCT |
| | | GGAGGTGATCTGCAC |
| | | CTTGCACAAACTCAA |
| SEQ ID | GI 1015224512 NG_023402 Homo sapiens | GCAAGCACTGCCTAT |
| NO: 3289 | Janus kinase 1 | GGACTGGCTAGTGCT |
| | (JAK1), RefSeqGene on chromosome 1 | GTTGGGTGCCCAAGT |
| | | GTAAAAAGGAGTATT |
| SEQ ID | GI 237858777 NG_012128 Homo sapiens | TAGGATTGCACAGTG |
| NO: 3290 | solute carrier family 11 member 1 | AGTGACAAGCCATGA |
| | (SLC11A1), RefSeqGene on chromosome 2 | TGCTGCTGTCTCCTC |
| | | TCTGGACCCATCATT |
| SEQ ID | GI 323098322 NM_005624 Homo sapiens | GAAATAAGGTTTTTG |
| NO: 3291 | C-C motif chemokine ligand 25 | CAAAGCTCCACCACA |
| | (CCL25), transcript variant 1, mRNA | ACACGCAGACCTTCC |
| | | AAGCAGGCCCTCATG |
| SEQ ID | GI 117606541 EF064745 Homo sapiens | GTCTACACTGTGCTG |
| NO: 3292 | chemokine | AGTCTGAAGGCTGGG |
| | (C-X3-C motif) ligand 1 | TTCTGATCCTAGTTC |
| | (CX3CL1) gene, complete cds | CACCATCAAGCCACC |
| SEQ ID | GI 294489317 NG_017064 Homo sapiens | AGGAGTCGAGGAGGA |
| NO: 3293 | acyl-CoA dehydrogenase family member 9 | GAGGAAGCCATCACG |
| | (ACAD9), RefSeqGene on chromosome 3 | TTCACCTGACCTAGT |
| | | TTTCTGGGAGAAGTT |
| SEQ ID | GI 225543278 NG_011648 Homo sapiens | GCCCTGAATGTGTGA |
| NO: 3294 | angiotensin 1 converting enzyme | AGTAGGCGGTGAGGA |
| | (ACE), RefSeqGene on chromosome 17 | CAGTAAGGGATGGTA |
| | | GGGAGTAAGGCAAAG |
| SEQ ID | GI 334085262 NG_029008 Homo sapiens | GAAATAGTGGTAGCA |
| NO: 3295 | CRK proto-oncogene, adaptor protein | GAAAGCCTTCAGTGA |
| | (CRK), RefSeqGene on chromosome 17 | CCAGCCCAACCCAGT |
| | | TTAAGGCGATGCCTG |
| SEQ ID | GI 582015216 NG_016002 Homo sapiens | ATGGGCCTGTGTGGA |
| NO: 3296 | G protein subunit alpha i2 | CAGCTTCACAAAAAA |
| | (GNAI2), RefSeqGene on chromosome 3 | AGGAGACAGTGTCCA |
| | | CCATTGGCTCCATAA |
| SEQ ID | GI 291045455 NG_016708 Homo sapiens | CTCAGAGGATTGGTT |
| NO: 3297 | MDM2 proto-oncogene | TGACCAGGCATGTCA |
| | (MDM2), RefSeqGene on chromosome 12 | TTTAGCCCTCAAGAA |
| | | AACTGGCCCTCCCAC |
| SEQ ID | GI 116006947 NM_001285 Homo sapiens | ACTGAGCAGATGGGC |
| NO: 3298 | chloride channel accessory 1 | AACTGTGGAGAGAAG |
| | (CLCA1), mRNA | GGTGAAAGGATCCAC |
| | | CTCACTCCTGATTTC |
| SEQ ID | GI 399567818 NM_003299 Homo sapiens | TTGTCAAGGGTGTGG |
| NO: 3299 | heat shock protein 90 beta | TGGACTCAGATGATC |
| | family member 1 | TCCCCTTGAATGTTT |
| | (HSP90B1), mRNA | CCCGCGAGACTCTTC |
| SEQ ID | GI 188219598 NM_004688 Homo sapiens | TATGACAGACAGTCC |
| NO: 3300 | N-myc and STAT interactor | GGGAGTGCAGTCATC |
| | (NMI), mRNA | ACGTTTGTGGAGATT |
| | | GGAGTGGCTGACAAG |
| SEQ ID | GI 117606569 EF064759 Homo sapiens | CAACCTCAGCACCAT |
| NO: 3301 | chemokine | TGATCTTCTTGGTCA |
| | (C-C motif) receptor 4 | GACAACTCTTTGCTG |
| | (CCR4) gene, complete cds | TGGTGGGCTGTCCTG |
| SEQ ID | GI 224809308 NG_011502 Homo sapiens | CAGAAGCCACCCTGA |
| NO: 3302 | cytotoxic T-lymphocyte | CAGGGAACTAATGAG |
| | associated protein 4 | ACATTTTCTACAGGG |
| | (CTLA4), RefSeqGene on chromosome 2 | GTCTGTCCCAGGTGG |
| SEQ ID | GI 343098522 NG_029664 Homo sapiens | CCAAAGGCCAAGGTC |
| NO: 3303 | cathepsin E | CAAACTGAACTCAGT |
| | (CTSE), RefSeqGene on chromosome 1 | GCTGAGCTCATGAGC |
| | | TGTTCCTCAAACTCC |
| SEQ ID | GI 393533306 NG_032816 Homo sapiens | CATTCTGCTGTACCA |
| NO: 3304 | 5-hydroxytryptamine receptor 1A | AGGGTCTGCGGAAAC |
| | (HTRIA), RefSeqGene on chromosome 5 | CACCTTTTTGCCCTT |
| | | TGAATTGTGCAGCAT |
| SEQ ID | GI 1016841222 NG_008723 Homo sapiens | TGTAGCCCATTTTCC |
| NO: 3305 | monoamine oxidase B | TGTGAAAGGCCTTGA |
| | (MAOB), RefSeqGene on chromosome X | CTTGGATTGAAGCTG |
| | | GGCTCCTCCAACTTC |
| SEQ ID | GI 340007370 NG_029431 Homo sapiens | GTTCTCAGATGCGTA |
| NO: 3306 | ras-related C3 botulinum | AAGCAGAACAGCCTC |
| | toxin substrate 1 | CCGAATGAAGCGTTG |
| | (rho family, small GTP | CCATTGAACTCACCA |
| | binding protein Rael) | |
| | (RAC [symbol] | |
| SEQ ID | GI 959241467 NG_046314 Homo sapiens | ACTGGGGTAGCTGGC |
| NO: 3307 | signal transducer and | CTACCAGGTAGCTCA |
| | activator of transcription 2 | GATGGTGATTGAGTT |
| | (STAT2), RefSeqGene on chromosome 12 | TGCTGAGAAACCATC |
| SEQ ID | GI 1024336756 NG_046908 Homo sapiens | AGTGGGAGATTGACT |
| NO: 3308 | YYl transcription factor | GCCAAAGAGGAAGTA |
| | (YYl), RefSeqGene on chromosome 14 | GGAGAGGTGTGAGAG |
| | | GTTGGAGTCCAGTGA |
| SEQ ID | GI 748585173 NM_198580 Homo sapiens | CTTCTGGGACGACTG |
| NO: 3309 | solute carrier family 27 member 1 | CATCAAGTACAACTG |
| | (SLC27A1), mRNA | CACGGTGGTTCAGTA |
| | | CATCGGGGAGATCTG |
| SEQ ID | GI 1049010711 AH003036 Homo sapiens | AAGGAGCTGGGGACT |
| NO: 3310 | Bruton agammaglobulinemia | GGACAATTTGGGGTA |
| | (BTK) gene, complete cds | GTGAAGTATGGGAAA |
| | | TGGAGAGGCCAGTAC |
| SEQ ID | GI 56788327 AY851164 Homo sapiens | ATCTGGGGTTAATGA |
| NO: 3311 | carboxylesterase 2 | ACCCAGGCTTTGATA |
| | (intestine, liver) | CAGGGGGTTCGATTG |
| | (CES2) gene, complete cds | CAAAGATTGGGAGGC |
| SEQ ID | GI 14488405 AF386077 Homo sapiens | AGATTTCAGGAGGGA |
| NO: 3312 | interleukin 17B | ATGGGCCAGGCCACC |
| | (IL17B) gene, complete cds | GTCTACTTCTGGATA |
| | | CACCCACCATTTTAT |
| SEQ ID | GI 269308199 NG_015892 Homo sapiens | CTCCAGCTTTCCCCC |
| NO: 3313 | bassoon presynaptic cytomatrix protein | AGGGATTTGCAGCCT |
| | (BSN), RefSeqGene on chromosome 3 | CATTTTCCCCATCCA |
| | | TAGTCCATTTTGCTA |
| SEQ ID | GI 1024846763 NG_046978 Homo sapiens | TGGCAGACAATGAGA |
| NO: 3314 | Charcot-Leyden crystal galectin | AGTGGCCATGCTATG |
| | (CLC), RefSeqGene on chromosome 19 | GCTATTCTGTGAGAG |
| | | TAGAGGCATGGGGTT |
| SEQ ID | GI 334085262 NG_029008 Homo sapiens | CTTCCTTTCCCGCCC |
| NO: 3315 | CRK proto-oncogene, adaptor protein | TTCTATTTCCTGCCT |
| | (CRK), RefSeqGene on chromosome 17 | TTGGCTGTTTGTGGT |
| | | TGGAAGGAGAGGAAA |
| SEQ ID | GI 1024846760 NG_046988 Homo sapiens | TGAGCTATGAATGCC |
| NO: 3316 | E2F transcription factor 1 | CCTCTCTGAGCCTCT |
| | (E2F1), RefSeqGene on chromosome 20 | TCCTTCCTGCACCAT |
| | | GTGGATAAACAAGCT |
| SEQ ID | GI 339515631 NG_029366 Homo sapiens | AGCTCCCGCTTTAAC |
| NO: 3317 | coagulation factor III, tissue factor | TCTGGGGAAAGGGCT |
| | (F3), RefSeqGene on chromosome 1 | TCCCAGTGAGTTGCG |
| | | ACCTTCAATATGATA |
| SEQ ID | GI 291084780 NG_016747 Homo sapiens | CGCAGAACCTCTTTC |
| NO: 3318 | PPARG coactivator 1 beta | CTCATCTGCAAGGTG |
| | (PPARGC1B), RefSeqGene on chromosome 5 | GAGATAACAACAGTA |
| | | CCCACCTCACAGGCT |
| SEQ ID | GI 238018099 NG_012213 Homo sapiens | AGCCAGGTGACTGCA |
| NO: 3319 | superoxide dismutase 3 | TCTTGCCTAGGCACA |
| | (SOD3), RefSeqGene on chromosome 4 | GAAGAGTAGGGTTGG |
| | | AATGTGACGTTGTTA |
| SEQ ID | GI 574957093 NM_001252 Homo sapiens | CTGGACAAGGGGCAG |
| NO: 3320 | CD70 molecule | CTACGTATCCATCGT |
| | (CD70), transcript variant 1, mRNA | GATGGCATCTACATG |
| | | GTACACATCCAGGTG |
| SEQ ID | GI 164695749 AK315559 Homo sapiens | GCTGGAAAAACAGTG |
| NO: 3321 | cDNA, FLI96630, Homo sapiens | CCGATTGTGAAAGGA |
| | methionyl aminopeptidase 2 | GGGGAGGCAACAAGA |
| | (METAP2), mRNA | ATGGAGGAAGGAGAA |
| SEQ ID | GI 209571510 NM_015000 Homo sapiens | AACTGCACTGCCTAC |
| NO: 3322 | serine/threonine kinase 38 like | ATGCGTATTAAGGTC |
| | (STK38L), mRNA | CATTCTGCCTGTGTG |
| | | TGCTGTGGCTTTGAA |
| SEQ ID | GI 22128580 AF533019 Homo sapiens | TCAGTTTCCCCTTTT |
| NO: 3323 | growth arrest and DNA-damage- | GCATAATGCACATAA |
| | inducible, beta | GCATCCCCCCTGCTT |
| | (GADD45B) gene, complete cds | CCCAGGTCTTGGATT |
| SEQ ID | GI 14488404 AF385628 Homo sapiens | TTTCAGAGACAGCAG |
| NO: 3324 | interleukin 8 | AGCACACAAGCTTCT |
| | (IL8) gene, complete cds | AGGACAAGAGCCAGG |
| | | AAGAAACCACCGGAA |
| SEQ ID | GI 77744394 DQ230990 Homo sapiens | CATCTGGCAAGAAAT |
| NO: 3325 | peroxiredoxin 6 | ACCTCCGCTACACAC |
| | (PRDX6) gene, complete cds | CCCAGCCTTAAGTCT |
| | | CTTGGAGAAGCTGGT |
| SEQ ID | GI 224809296 NG_011498 Homo sapiens | TAGACCAGGCTGCCA |
| NO: 3326 | interleukin 23 receptor | GGAAAAGAAAAGAGC |
| | (IL23R), RefSeqGene on chromosome 1 | AGAGAGAAGTCATTG |
| | | GTGACATCCCACCCA |
| SEQ ID | GI 315360651 NG_028027 Homo sapiens | CAAGAGCCCAAGAGC |
| NO: 3327 | prodynorphin | CCCATGATACTGTTG |
| | (PDYN), RefSeqGene on chromosome 20 | TCCCCACTGTACAGA |
| | | TGAGCAATCAGAGGT |
| SEQ ID | GI 237858755 NG_012119 Homo sapiens | TTTTGAGTATCCAGG |
| NO: 3328 | protein tyrosine phosphatase, | AGGGCTGGGGACTTT |
| | non-receptor type 1 | GGAGTAGTTGGTGAT |
| | (PTPN1), RefSeqGene on | TCCCTCTGCCACATT |
| | chromosome 2 [symbol] | |
| SEQ ID | GI 187171274 NM_030662 Homo sapiens | CGGTGTGTTCACCCC |
| NO: 3329 | mitogen-activated | CGACTTCCAGGAGTT |
| | protein kinase kinase 2 | TGTCAATAAATGCCT |
| | (MAP2K2), mRNA | CATCAAGAACCCAGC |
| SEQ ID | GI 115387093 NM_003000 Homo sapiens | TGTGGCTCTTGTGCA |
| NO: 3330 | succinate dehydrogenase complex iron | ATGAACATCAATGGA |
| | sulfur subunit B | GGCAACACTCTAGCT |
| | (SDHB), Mrna | TGCACCCGAAGGATT |
| SEQ ID | GI 928192547 NM_006472 Homo sapiens | TGCCCAACCCTGTGA |
| NO: 3331 | thioredoxin interacting protein | TCAGAACCTCCAAAT |
| | (TXNIP), transcript variant 1, mRNA | ACTGCCATGAGAAAC |
| | | TAGAGGGCAGGTCTT |
| SEQ ID | GI 1212624021 NM_017523 Homo sapiens | TTGCCTGCAAGAAAC |
| NO: 3332 | XIAP associated factor 1 | GAAACTCAACCGAAA |
| | (XAF1), transcript variant 1, mRNA | GCCTGCAGAGAGCAG |
| | | AACATGGAAGGAGAC |
| SEQ ID | GI 24079970 AF550128 Homo sapiens | AGCAGCATGTGAGAA |
| NO: 3333 | excision repair cross-complementing | GAACCTGGAGGCAGG |
| | rodent repair deficiency, | AAGGAGCTTAGTGAT |
| | complementation group 5 | TTCTGGGTTTGAGGA |
| | (ERCC [symbol] | |
| SEQ ID | GI 27501935 AY207429 Homo sapiens | CCGTCTCCCTGTCTC |
| NO: 3334 | interleukin 11 | TGTCTCAGTCTGTCC |
| | (ILH) gene, complete cds | TTCACTCTGTGTGTG |
| | | TGTGTGTGTGTCTCT |
| SEQ ID | GI 937628170 KP290484 Homo sapiens | ACTTCTTCCTGTGCA |
| NO: 3335 | OR10J3 | TGCTATCCATCTCTG |
| | (OR10J3) gene, complete cds | AGACCTGCTACACTG |
| | | TGGCCATCATTCCCC |
| SEQ ID | GI 83699688 DQ323999 Homo sapiens | CATCTCTTAACTCAG |
| NO: 3336 | TNF receptor-associated factor 4 | CACCTCTGACATTTC |
| | (TRAF4) gene, complete cds | CAGAGCCATGAGGGT |
| | | ATGTGCCCCCAGGAG |
| SEQ ID | GI 219689119 NG_009261 Homo sapiens | CATCAGACTATTCCC |
| NO: 3337 | elastin | AGGAGGGGGTAGGAA |
| | (ELN), RefSeqGene on chromosome 7 | TCCTGGGTTTGAGTC |
| | | CCAGCTCAGACACTA |
| SEQ ID | GI 1121393451 NG_012066 Homo sapiens | GGTTCAGCATGGGCA |
| NO: 3338 | Fc fragment of IgG receptor Ila | GTTCCCCCATTTTAG |
| | (FCGR2A), RefSeqGene on chromosome 1 | TGGGGTCTGGGATTT |
| | | GCTTCTTAGATCCAC |
| SEQ ID | GI 334848111 NG_029036 Homo sapiens | GCTTGCTCATTCTAG |
| NO: 3339 | promyelocytic leukemia | AGGCAGCTGCTCCCA |
| | (PML), RefSeqGene on chromosome 15 | ACTCTGGACTGCTCT |
| | | GACTTAGAAAGTGCT |
| SEQ ID | GI 343432618 NG_029713 Homo sapiens | TTGGCCCTTGAGTCC |
| NO: 3340 | synoviolin 1 | AGTCACCCTGTCTGA |
| | (SYVN1), RefSeqGene on chromosome 11 | GTTCATTCAGCATGT |
| | | TCACTTGTGTTTGCC |
| SEQ ID | GI 8248053 AF199441 Homo sapiens | TCAGTGGCTTGGTGG |
| NO: 3341 | gastrointestinal glutathione peroxidase | GGACTCTTTCTTATT |
| | (GPX2) gene, complete cds | GGTTGCTTCTAGGAA |
| | | CTCCACCCAGCTTCA |
| SEQ ID | GI 306816 M96233 Human glutathione | GAGTCTTCTGCCCAA |
| NO: 3342 | transferase class mu number 4 | TTCCTCTCACTCCTG |
| | (GSTM4) gene, complete cds | GTTGTCTACACAGCC |
| | | CCTGCATGATGTTCT |
| SEQ ID | GI 14488404 AF385628 Homo sapiens | TAAATCTGGCAACCC |
| NO: 3343 | interleukin 8 | TAGTCTGCTAGCCAG |
| | (IL8) gene, complete cds | GATCCACAAGTCCTT |
| | | GTTCCACTGTGCCTT |
| SEQ ID | GI 334085206 NG_029005 Homo sapiens | GCTCCACTTCTATGG |
| NO: 3344 | CASP8 and FADD like apoptosis regulator | TGGTCACTCACATGA |
| | (CFLAR), RefSeqGene on chromosome 2 | CTGAGAAGTTGGTGC |
| | | TAGCTGTTGGCAGGA |
| SEQ ID | GI 742670592 NG_013347 Homo sapiens | CTGTGCCCTTGCCCC |
| NO: 3345 | glutamate-ammonia ligase | TTGCTCTTATCTTGG |
| | (GLUL), RefSeqGene on chromosome 1 | TCCGTGTATCTGGGA |
| | | GTTCTTCCACCTTAT |
| SEQ ID | GI 342307070 NG_029606 Homo sapiens | GTTCCGCAAGCCCTG |
| NO: 3346 | hypoxia inducible factor 1 alpha subunit | AAAGCGCAAGTCCTC |
| | (HIF1A), RefSeqGene on chromosome 14 | AAAGCACAGTTACAG |
| | | TATTCCAGCAGACTC |
| SEQ ID | GI 1024336778 NG_046901 Homo sapiens | CTAACCCGGCCATTG |
| NO: 3347 | NLR family pyrin domain containing 9 | GAAGCATAACCCAGC |
| | (NLRP9), RefSeqGene on chromosome 19 | TTGTAAGAGCAAGTG |
| | | TGGTTCAGCCTCAAA |
| SEQ ID | GI 1041818081 NG_051000 Homo sapiens | CAGGTCACATTGTTC |
| NO: 3348 | pentraxin 3 | CTGAGGGAGGAATCC |
| | (PTX3), RefSeqGene on chromosome 3 | TGCAGATTGGCCAAG |
| | | AAAAGAATGGCTGCT |
| SEQ ID | GI 364023822 NM_130898 Homo sapiens | AGGCCTTATCTCCAT |
| NO: 3349 | cAMP responsive element | CCAGCTAGATCAGTG |
| | binding protein 3 like 4 | GAGCCCAGCATTTAT |
| | (CREB3L4), transcript variant 1, mRNA | GGTGCCTGATTCCTG |
| SEQ ID | GI 735661405 NM_002201 Homo sapiens | CCCTATTCCTGGTGC |
| NO: 3350 | interferon stimulated exonuclease gene 20 | ATTTATGCCCAGAGA |
| | (ISG20), transcript variant 1, mRNA | GGTGGCATTATTTCC |
| | | TGGGGTGGCATTCAG |
| SEQ ID | GI 61744461 NM_003405 Homo sapiens | AGATCGAAATCTCCT |
| NO: 3351 | tyrosine 3-monooxygenase/tryptophan 5- | CTCTGTGGCCTACAA |
| | monooxygenase activation protein eta | GAATGTGGTTGGTGC |
| | (YWHAH), [symbol] | CAGGCGATCTTCCTG |
| SEQ ID | GI 117606529 EF064739 Homo sapiens | CACAGAACTCCCGTT |
| NO: 3352 | Fas ligand | GTGTGGCAATGCTCA |
| | (TNF superfamily, member 6) | GTGGGAGTAAGGAGA |
| | (FASLG) gene, complete cds | TAAGGCTGGACAGAT |
| SEQ ID | GI 834400732 NG_042181 Homo sapiens | GCCACCAGCCTCCAT |
| NO: 3353 | collagen type XII alpha 1 chain | CTGGATTCCCCTTTC |
| | (COL12A1), RefSeqGene on chromosome 6 | TTTTACTGGGGACTG |
| | | GAAATTCCAAGCAAT |
| SEQ ID | GI 1154067877 NG_052975 Homo sapiens | ATTCTATGCTGGGTA |
| NO: 3354 | C-X-C motif chemokine receptor 2 | CTTGCTAAACTCGGG |
| | (CXCR2), RefSeqGene on chromosome 2 | ACCAAGCACGACTCA |
| | | ACTGCTCTGGCTGAG |
| SEQ ID | GI 189217849 NG_007932 Homo sapiens | GGCCACCCCATGCAA |
| NO: 3355 | cytochrome P450 family | ATGATTGGTCTTCTC |
| | 4 subfamily A member 11 | TCTGTTTCCAACCTG |
| | (CYP4A11), RefSeqGene on chromosome [symbol] | CACCACAGGTATCAT |
| SEQ ID | GI 189458878 NM_139166 Homo sapiens | GAAATATAGCCCAGT |
| NO: 3356 | actin binding Rho activating protein | GGGCAACTTGAAAGG |
| | (ABRA), mRNA | GAGATGGCAGCAGTG |
| | | GGCTGATGAACACAT |
| SEQ ID | GI 325652058 NM_005524 Homo sapiens | AACTCCCCAACCCAC |
| NO: 3357 | hes family bHLH transcription factor 1 | CTCTCTTCCCTCCGG |
| | (HES1), mRNA | ACTCTAAACAGGAAC |
| | | TTGAATACTGGGAGA |
| SEQ ID | GI 20379137 AF498982 Homo sapiens | CGACTCTGAAAATCG |
| NO: 3358 | 5-hydroxytryptamine receptor 2A | AACCAACCTTTCCTG |
| | (HTR2A) mRNA, complete cds | TGAAGGGTGCCTCTC |
| | | ACCGTCGTGTCTCTC |
| SEQ ID | GI 45934429 AY585238 Homo sapiens | AGTACCCCGACCTCA |
| NO: 3359 | creatine kinase, muscle | GCAAACATAACAACC |
| | (CKM) gene, complete cds | ACATGGCCAAGGTAC |
| | | TGACCCTTGAACTCT |
| SEQ ID | GI 57790271 AY878121 Homo sapiens | CTCCCCTTTACTCTC |
| NO: 3360 | glutathione S-transferase A4 | TGAGTCTCACTCTCG |
| | (GSTA4) gene, complete cds | CATTCTTCCCTCACT |
| | | CCCCCAGTTCAGTCC |
| SEQ ID | GI 254911080 NG_012514 Homo sapiens | AATGGATTTGGAGAG |
| NO: 3361 | interleukin 13 receptor subunit alpha 2 | AGGGGTCAACTCTCA |
| | (IL13RA2), RefSeqGene on chromosome X | CTCCCCCAGTCCACT |
| | | GTTTTGGACACAACA |
| SEQ ID | GI 169790799 NG_007447 Homo sapiens | GCTCTTGGACTCCAG |
| NO: 3362 | TGFB induced factor homeobox 1 | ACACTGACTTCAACT |
| | (TGIF1), RefSeqGene on chromosome 18 | TACCACTTTCCGCCC |
| | | CGATTAGAAAGGCCT |
| SEQ ID | GI 554506569 NM_001114 Homo sapiens | GTTCCCTGAGGTGCC |
| NO: 3363 | adenylate cyclase 7 | AGGCAGGCAACTTTA |
| | (ADCY7), transcript variant 1, mRNA | GCACATGATGAAAAC |
| | | AGACTTCCACCTCAG |
| SEQ ID | GI 206597534 NM_001639 Homo sapiens | CTCATCCTGGTCACT |
| NO: 3364 | amyloid P component, serum | GCTTCTGCTATAACA |
| | (APCS), mRNA | GCCCTAGGCCAGGAA |
| | | TATGAACAAGCCGCT |
| SEQ ID | GI 167555126 NM_005582 Homo sapiens | CTCCAAGCATTAGGT |
| NO: 3365 | CD180 molecule | AAACCCACCAAGCAA |
| | (CD180), mRNA | TCCTAGCCTGTGATG |
| | | GCGTTTGACGTCAGC |
| SEQ ID | GI 735367774 NM_000211 Homo sapiens | GTGGAACAATGATAA |
| NO: 3366 | integrin subunit beta 2 | TCCCCTTTTCAAGAG |
| | (ITGB2), transcript variant 1, mRNA | CGCCACCACGACGGT |
| | | CATGAACCCCAAGTT |
| SEQ ID | GI 385137136 NM_012340 Homo sapiens | CTCACCCCTCTGGCC |
| NO: 3367 | nuclear factor of activated T-cells 2 | TCTACAGCCCTCAGA |
| | (NFATC2), transcript variant 1, mRNA | GGAGAGAAAACCAAT |
| | | TCTCCAACAAACAGG |
| SEQ ID | GI 214832245 NM_017853 Homo sapiens | ACTCCAGGAATAAGA |
| NO: 3368 | thioredoxin like 4B | CAAAAGGAGAGGAGG |
| | (TXNL4B), transcript variant 1, mRNA | AGGCCATCACCTCTG |
| | | GCCTCTTCCATCGTA |
| SEQ ID | GI 751368105 NM_145911 Homo sapiens | GTGTCATACCATCAC |
| NO: 3369 | zinc finger protein 23 | TGGAGAGCAGCCCTC |
| | (ZNF23), transcript variant 1, mRNA | TGGGTGTACAGGATT |
| | | GGGGAAATCCATCAG |
| SEQ ID | GI 261599023 NG_013217 Homo sapiens | TTGAATGCCCAGTGA |
| NO: 3370 | apoptosis inducing factor | AACAGAAACGGTGCA |
| | mitochondria associated 1 | GGGCAAGTAAGGAGT |
| | (AIFM1), RefSeqGene on chromosome [symbol] | CGGTTGGTTGTGTAC |
| SEQ ID | GI 307133697 NG_027730 Homo sapiens | GGTATGTTGTTCACT |
| NO: 3371 | C-C motif chemokine ligand 3 | CTCCAGCTCACTCTA |
| | (CCL3), RefSeqGene on chromosome 17 | GGTCTCCCAGGAGCT |
| | | CTGTCCCTTGGATGT |
| SEQ ID | GI 1002095861 NG_046750 Homo sapiens | GCCAGCCTTCTCTGG |
| NO: 3372 | cytochrome c oxidase subunit 8A | TCTTCCTTTTTGGTG |
| | (COX8A), RefSeqGene on chromosome 11 | GACTTCATTTCTTAG |
| | | GTGCTGGTGCCCTTC |
| SEQ ID | GI 197116369 NG_008383 Homo sapiens | TAACTATGGGTTGGC |
| NO: 3373 | cytochrome P450 family | AACATGTTCCTGGAT |
| | 2 subfamily E member 1 | GTGTTTGCTGGCACA |
| | (CYP2E1), RefSeqGene on | GTGACAGGTGCTAGC |
| | chromosome 10 [symbol] | |
| SEQ ID | GI 937500889 NG_032896 Homo sapiens | CTCCTTCCAAGCCAA |
| NO: 3374 | purinergic receptor P2Y1 | AAGAAGCCTCTGGGA |
| | (P2RY1), RefSeqGene on chromosome 3 | AGGTGTGCCAATGGT |
| | | GAAAACGTACAGAGG |
| SEQ ID | GI 1024846788 NG_047009 Homo sapiens | GGGCCATGAAGAATG |
| NO: 3375 | platelet and endothelial | AATGGAGTGATGGCA |
| | cell adhesion molecule 1 | GCATTGAGGGAGAAA |
| | (PECAM1), RefSeqGene on chromosome | GATCAGCAGGAGCAC |
| SEQ ID | GI 307611978 NM_005409 Homo sapiens | TTCAAGGCTTCCCCA |
| NO: 3376 | C-X-C motif chemokine ligand 11 | TGTTCAAAAGAGGAC |
| | (CXCL11), transcript variant 1, mRNA | GCTGTCTTTGCATAG |
| | | GCCCTGGGGTAAAAG |
| SEQ ID | GI 167234418 NM_005119 Homo sapiens | CCTATTTCCTGATTT |
| NO: 3377 | thyroid hormone receptor associated | CTTCTGGGCTGGACT |
| | protein 3 | TCCCCGTTCTCCACC |
| | (THRAP3), mRNA | AGCAGCTCCAGTATC |
| SEQ ID | GI 326535636 GU997628 Homo sapiens | GTGATAATACAGAAA |
| NO: 3378 | annexin A1 | GGTGGGGCTGGTGTA |
| | (ANXAl) gene, complete cds | GGGGTGAAGTCAGGA |
| | | TGCTTTGGGAGAGCA |
| SEQ ID | GI 68248543 DQ096732 Homo sapiens | CGAGTGCTAGCTGAC |
| NO: 3379 | glutathione peroxidase 7 | TGAGCCAAAAATTGA |
| | (GPX7) gene, complete cds | GCCCAGGTCTCCCTT |
| | | TGTACCCCCTCTTAT |
| SEQ ID | GI 974987497 NG_011800 Homo sapiens | CTGGGCATGGTTACG |
| NO: 3380 | ceruloplasmin | GTGCTCTGATCAACA |
| | (CP), RefSeqGene on chromosome 3 | TCTTTCCATGCACAA |
| | | GATTGGGGCTGAGTT |
| SEQ ID | GI 299782605 NG_023187 Homo sapiens | GATTCCCCACTCCCC |
| NO: 3381 | major histocompatibility | TGAGTTTCACTTCTT |
| | complex, class 1, B | CTCCCAACTTGTGTC |
| | (HLA-B), RefSeqGene on chromosome 6 | GGGTCCTTCTTCCAG |
| SEQ ID | GI 189409110 NM_153000 Homo sapiens | GTTTGAAGTTTCTGC |
| NO: 3382 | APC down-regulated 1 | TTTGAACTCCGTCCA |
| | (APCDD1), mRNA | GCCTGATCCCTGGCC |
| | | TGAGCAACTTCACAA |
| SEQ ID | GI 1027853651 NM_182828 Homo sapiens | AGACCTTTGGCTGCC |
| NO: 3383 | growth differentiation factor 7 | AGAATCTAGAACCAT |
| | (GDF7), mRNA | GGCTGACCAAAGCGA |
| | | GACTTCCGAGTAAGG |
| SEQ ID | GI 338797748 NM_006743 Homo sapiens | AACTGCCATGTCCTC |
| NO: 3384 | RNA binding motif | TGAAGAAGGAAAGCT |
| | (RNP1, RRM) protein 3 | CTTCGTGGGAGGGCT |
| | (RBM3), mRNA | CAACTTTAACACCGA |
| SEQ ID | GI 392055950 JQ867454 Homo sapiens | ATGGCCACTGCTTTG |
| NO: 3385 | ERBB receptor feedback inhibitor 1 | CAGAAAATGGTCCAT |
| | (ERRFIl) gene, complete cds | CTCAAAAGTCCAGCT |
| | | TGCCCCCTCTTCTTA |
| SEQ ID | GI 225735572 NG_011717 Homo sapiens | TGCCATAGCTGGCAG |
| NO: 3386 | alpha-2-macroglobulin | AAACACAGAAGCACT |
| | (A2M), RefSeqGene on chromosome 12 | ACCAAAATCCACATG |
| | | CTGGTCACTGTGAGC |
| SEQ ID | GI 223972657 NG_009817 Homo sapiens | ATGGTGCGTTTTTGC |
| NO: 3387 | E1A binding protein p300 | CTGGTTCTTGAACTC |
| | (EP300), RefSeqGene on chromosome 22 | GGAGAAGAGAGACTA |
| | | GGCTTCTCCTGCTCC |
| SEQ ID | GI 1657840 U73304 Human | TCCCACACATTGATG |
| NO: 3388 | CB1 cannabinoid receptor | AAACCTACCTGATGT |
| | (CNR1) gene, complete cds | TCTGGATCGGGGTCA |
| | | CCAGCGTACTGCTTC |
| SEQ ID | GI 593023777 KJ145927 Homo sapiens | CCTCTCAGCTTCCTT |
| NO: 3389 | lamin A/C | CCAGTTCTTGTGTTC |
| | (LMNA) gene, complete cds | TGTGACCCCTTTTCC |
| | | TCATCTCTGCCTGCT |
| SEQ ID | GI 224809232 NG_011437 Homo sapiens | ACCAGACATACATGT |
| NO: 3390 | arachidonate 5-lipoxygenase | GTTTTTGGCCCAAAG |
| | (ALOX5), RefSeqGene on chromosome 10 | CAGGGGTCTTTAGTT |
| | | GGAATGCCTCCTCCC |
| SEQ ID | GI 197245396 NG_008399 Homo sapiens | GGCAAACGTACATGC |
| NO: 3391 | aspartoacylase | TTCCAAGGCCAAGGA |
| | (ASPA), RefSeqGene on chromosome 17 | GGAAACACAGTATTT |
| | | AGCCACCGGGAACTT |
| SEQ ID | GI 269954683 NG_015990 Homo sapiens | GCAGTACTTAATGGA |
| NO: 3392 | C-C motif chemokine ligand 5 | CAGAGCACTGAAGTG |
| | (CCL5), RefSeqGene on chromosome 17 | GGAGTGAGGGCAACT |
| | | GGGTTCTGATCCCAA |
| SEQ ID | GI 816197633 NG_008177 Homo sapiens | CCCTTGCCTTTGAAA |
| NO: 3393 | GATA binding protein 4 | AACGCTTCATTCTCT |
| | (GATA4), RefSeqGene on chromosome 8 | GCTAGCTAGGCATTC |
| | | TGGGATGGGTGGGTC |
| SEQ ID | GI 577019604 NG_033916 Homo sapiens | AGAACTTTGCCTGTA |
| NO: 3394 | growth differentiation factor 2 | CTGTAGCTCAAGCCA |
| | (GDF2), RefSeqGene on chromosome 10 | CGCTAAAGCCAAACC |
| | | GTTGCCAACCAAGAA |
| SEQ ID | GI 212549732 NG_008981 Homo sapiens | GCGTCAGCAGCTTGC |
| NO: 3395 | growth differentiation factor 6 | AAAGCTCAGATCTCA |
| | (GDF6), RefSeqGene on chromosome 8 | ACAGAGGCCTGACTC |
| | | AGGATGAGTATCTCC |
| SEQ ID | GI 197245401 NG_008401 Homo sapiens | TCCCTCCATAGGCTG |
| NO: 3396 | glial fibrillary acidic protein | TTCTAAGGGGAGCCT |
| | (GFAP), RefSeqGene on chromosome 17 | TGGTACCAAAGCCAC |
| | | TAGATGGGATCCTAA |
| SEQ ID | GI 1135449810 NG_052673 Homo sapiens | CCTAACGGAAAGCAC |
| NO: 3397 | 0-6-methylguanine-DNA methyltransferase | AGAAAACAAAACCAC |
| | (MGMT), RefSeqGene on chromosome 10 | CAACTCTGTGTTCGC |
| | | CGAGGAAGGCAGGAA |
| SEQ ID | GI 345478700 NG_029900 Homo sapiens | GGGCTGCAGAGATGT |
| NO: 3398 | p21 | CCCCCTCAACACTGT |
| | (RAC1) activated kinase 1 | AGAAGAGAGGAGAAC |
| | (PAK1), RefSeqGene on chromosome 11 | TTGGGAAGTAGACCT |
| SEQ ID | GI 378786656 NG_032107 Homo sapiens | CCATCGGCTTCCCTG |
| NO: 3399 | TNF receptor superfamily member 10a | GGTCTTAGGTTTTTG |
| | (TNFRSF10A), RefSeqGene on chromosome 8 | GGCTGGATTAAGTCC |
| | | TGCTTCCAGCATTTC |
| SEQ ID | GI 815930042 NM_001308319 Homo sapiens | CTATGTTCCCCATGC |
| NO: 3400 | chromodomain helicase | TGCTGTCAGGAATGG |
| | DNA binding protein 9 | CTGGATTACCAAATC |
| | (CHD9), transcript variant 1, mRNA | TGTTGGGCATGGGAG |
| SEQ ID | GI 4455117 AF125158 Homo sapiens | GAGTGTGGTTTCGGC |
| NO: 3401 | zinc finger DNA binding protein 99 | CAATCTGTTACCTCA |
| | (ZNF281) mRNA, complete cds | GTGTTGCCATCTTCA |
| | | TTGCCAAAGCCTCCT |
| SEQ ID | GI 117606545 EF064747 Homo sapiens | GTGACCAGTGTGGGC |
| NO: 3402 | class 11, major histocompatibility | AAATGCTGGAGGTTC |
| | complex, transactivator | TCAGATTTGAAGCTA |
| | (CIITA) gene, complete cds | ATGGACCCGTTTGCT |
| SEQ ID | GI 166706816 EU332867 Homo sapiens | GTTACTGGATCACAA |
| NO: 3403 | protein kinase C, epsilon | GCAGCCAGGGACAAT |
| | (PRKCE) gene, complete cds | GTGCAGTTGTTGGTC |
| | | CTGGGTCTTTGACAG |
| SEQ ID | GI 312433967 NG_027936 Homo sapiens | ATGGACCACGCGTTT |
| NO: 3404 | pannexin 1 | GGCAGGTACAGACTA |
| | (PANX1), RefSeqGene on chromosome 11 | TTAATTCTTCCCTCC |
| | | ATCTGGTGAGGGCAG |
| SEQ ID | GI 343432618 NG_029713 Homo sapiens | TTCCCAGGCATGAGA |
| NO: 3405 | synoviolin 1 | TGATGATGGTCTGGA |
| | (SYVN1), RefSeqGene on chromosome 11 | CTAGGACACTGGCAG |
| | | TGAAAATGGCAAGGA |
| SEQ ID | GI 224809355 NG_011515 Homo sapiens | CTTACTAACCACCTA |
| NO: 3406 | uncoupling protein 3 | GCCACAGGGAATCCT |
| | (UCP3), RefSeqGene on chromosome 11 | TGCACCTTGGTGTGC |
| | | TACCAGAGAAGTGGG |
| SEQ ID | GI 156104863 NM_003501 Homo sapiens | AATACCAGTGCTTGA |
| NO: 3407 | acyl-CoA oxidase 3, pristanoyl | GTATCCAATGCAGCA |
| | (ACOX3), transcript variant 1, mRNA | ATGGCGCTTGCTTCC |
| | | ATATCTGGCAGCTGT |
| SEQ ID | GI 740086238 NM_017921 Homo sapiens | TCGATGAAATTGCTG |
| NO: 3408 | NPL4 homolog, ubiquitin | CCAAACTTGGCCTGC |
| | recognition factor | GGAAGGTTGGCTGGA |
| | (NPLOC4), transcript variant 1, mRNA | TATTTACAGACCTCG |
| SEQ ID | GI 190014585 NM_021144 Homo sapiens | GCCAAGATGAAAGGT |
| NO: 3409 | PC4 and SFRS1 interacting protein 1 | TATCCCCATTGGCCA |
| | (PSIP1), transcript variant 1, mRNA | GCTCGAGTAGACGAA |
| | | GTTCCTGATGGAGCT |
| SEQ ID | GI 15021772 AF400075 Homo sapiens | CCAATTGTCTACACA |
| NO: 3410 | coagulation factor II | ATTGTGTTTGTGGTG |
| | (thrombin) receptor-like 1 | GGTTTGCCAAGTAAC |
| | (F2RL1) gene, complete cds | GGCATGGCCCTGTGG |
| SEQ ID | GI 32187528 AY324876 Homo sapiens | GACCTCTCACAGCCG |
| NO: 3411 | lactoperoxidase | CAGACACTAGAGGAG |
| | (LPO) gene, complete cds | TTGAACACAGTGCTG |
| | | AAGAGCAAGATGCTG |
| SEQ ID | GI 205361192 NG_008140 Homo sapiens | TTCCCAATTTCAGGA |
| NO: 3412 | aminoadipate-semialdehyde synthase | GCACGGACTCAGCAC |
| | (AASS), RefSeqGene on chromosome 7 | CCAATGTGGATGGAA |
| | | GAGGTCTCCCTTATT |
| SEQ ID | GI 379991110 NG_032143 Homo sapiens | CTGATGTGCATTCCT |
| NO: 3413 | aconitase 2 | GTGTTGCCCACTTAG |
| | (ACO2), RefSeqGene on chromosome 22 | ACAGAGTCCACCTGA |
| | | GACTTCTCTGCCAGG |
| SEQ ID | GI 219521817 NG_009217 Homo sapiens | GGGAGAGTTATCCTG |
| NO: 3414 | cathepsin B | GTTCTGGCTGTGTCC |
| | (CTSB), RefSeqGene on chromosome 8 | TCCCCATTTTGGCCA |
| | | TCTTATGAGCTCCTT |
| SEQ ID | GI 751130526 NG_041830 Homo sapiens | TATGTGTTGAAGGCA |
| NO: 3415 | DnaJ heat shock protein family | GGCCAGGGTCATATG |
| | (Hsp40) member C3 | GAGAGTGGAGGGTGA |
| | (DNAJC3), RefSeqGene on | GGAGTGTGACAGATA |
| | chromosome [symbol] | |
| SEQ ID | GI 237874184 NG_012166 Homo sapiens | ACCCTGAAATGACTC |
| NO: 3416 | T-box 21 | CAGCTGAGTTACAGC |
| | (TBX21), RefSeqGene on chromosome 17 | AAGGCCACATGTCCT |
| | | ACCTTCAGCACTCAG |
| SEQ ID | GI 1010228574 NM_001321573 Homo sapiens | CGCTCGGGGTCACCA |
| NO: 3417 | calcium/calmodulin dependent | ACAGTACCCATCAAG |
| | protein kinase II delta | CCACCCTGTATTCCA |
| | (CAMK2D), transcript variant 14, [symbol] | AATGGGAAAGAAAAC |
| SEQ ID | GI 71648785 DQ147772 Homo sapiens | CCAGAGATGAGATTC |
| NO: 3418 | apolipoprotein B mRNA editing | TTCCACTGGTTCAGC |
| | enzyme, catalytic polypeptide-like 3G | AAGTGGAGGAAGCTG |
| | (APOBEC3G) gene, comp | CATCGTGACCAGGAG |
| SEQ ID | GI 14423572 AF388025 Homo sapiens | TCTGTTTCTTGGCAC |
| NO: 3419 | colony stimulating factor 3 | GCTGGGGTAAATTAG |
| | (granulocyte) | GACAGAAGGTGACAG |
| | (CSF3) gene, complete cds | TCTTGGGTGTGGTCA |
| SEQ ID | GI 189217867 NG_007938 Homo sapiens | GGCAACATACAGTCT |
| NO: 3420 | cytochrome P450 family 3 | GCCCATCTGTCACCA |
| | subfamily A member 5 | ATCCTTTTCTACTCT |
| | (CYP3A5), RefSeqGene on chromosome 7 | GCACACTCCTGGGGA |
| SEQ ID | GI 190358507 NG_008042 Homo sapiens | TCTCTGGGCTTTATA |
| NO: 3421 | 2,4-dienoyl-CoA reductase 1 | ACCTCCTGGGAAGAA |
| | (DECR1), RefSeqGene on chromosome 8 | CTGGAGGTCTGTCAT |
| | | GGAGTCCCCTGAGTG |
| SEQ ID | GI 798958230 NG_042077 Homo sapiens | TGATACAGGCCACCC |
| NO: 3422 | enoyl-CoA hydratase, short chain 1 | ATCATCCAGTTGATG |
| | (ECHS1), RefSeqGene on chromosome 10 | ACATGGTGAGTGACC |
| | | AAGATGGGTGCATCT |
| SEQ ID | GI 298919225 NG_023030 Homo sapiens | ATAGGAAGCTGGGAC |
| NO: 3423 | heme oxygenase 1 | CAGAGAAAGCAAGTG |
| | (HMOX1), RefSeqGene on chromosome 22 | GCTCACCCATGGTCA |
| | | CACAGTTAAGGACTG |
| SEQ ID | GI 269954724 NG_016003 Homo sapiens | GGGCACCAACCTTCT |
| NO: 3424 | interferon alpha and | GGGCTAGAGAAATTG |
| | beta receptor subunit 2 | CCCAGGCTTTACAGA |
| | (IFNAR2), RefSeqGene on chromosome 21 | ACAAGCTGGAATCAG |
| SEQ ID | GI 723428434 NG_041793 Homo sapiens | GCATCACTACTCTCT |
| NO: 3425 | inhibitor of nuclear factor | GCTGGCTTCCTTGAG |
| | kappa B kinase subunit beta | GAACTATGCTACCCT |
| | (IKBKB), RefSeqGene on chromosome [symbol] | CCCTCTCTCCAGACC |
| SEQ ID | GI 654825055 NG_028206 Homo sapiens | TGCTTTTCATTCCAC |
| NO: 3426 | prostaglandin-endoperoxide synthase 2 | TCTTTTCCTGTCCTT |
| | (PTGS2), RefSeqGene on chromosome 1 | AAGTGGGACAAGATC |
| | | ACTGGGGGGGGGCTA |
| SEQ ID | GI 345478715 NG_029910 Homo sapiens | GAATGTCGAGAGGGG |
| NO: 3427 | TNF receptor superfamily member 25 | GTGAAGACATTTCTC |
| | (TNFRSF25), RefSeqGene on chromosome 1 | AACTTCTCGGCCGGA |
| | | GTTTGGCTGAGATCG |
| SEQ ID | GI 164695818 AK315628 Homo sapiens | CCTGCCTGAAGCCAT |
| NO: 3428 | cDNA, FU96713, Homo sapiens | GACCCGCTTCTCCTA |
| | ankyrin repeat and SOCS box-containing 2 | TGCAGAGTACTTTTC |
| | (ASB2), mRNA | CCTCTTTCACTCCTG |
| SEQ ID | GI 520262262 NM_002872 Homo sapiens | CTTAGCAGATGGCTG |
| NO: 3429 | ras-related C3 botulinum | CAGAGCTTCGTTGAT |
| | toxin substrate 2 | GGTCTTTTCTGTACT |
| | (rho family, small GTP | GGAGGCCTCCTGAGG |
| | binding protein Rac2) | |
| | (RA [symbol] | |
| SEQ ID | GI 966209818 NM_014031 Homo sapiens | CAGCTGTGATTAGTC |
| NO: 3430 | solute carrier family 27 member 6 | AGCTGCAGGTTTTAA |
| | (SLC27A6), transcript variant 1, mRNA | GGGGTTCTGCTGTCC |
| | | TGTGGGCTTTTGGTT |
| SEQ ID | GI 117606579 EF064764 Homo sapiens | GAAATTGGGCCTCAG |
| NO: 3431 | chemokine | GCTACAGCTGATGCT |
| | (C-C motif) ligand 22 | TAGTTGTTCTGAATC |
| | (CCL22) gene, complete cds | CCCGCTCCTAGAGCT |
| SEQ ID | GI 1036032812 AH005421 Homo sapiens | TCAGTATGAGCTGCT |
| NO: 3432 | CD19 | TCCTGTCCCTCTACC |
| | (CD19) gene, complete cds | TCTCACTGTCTTCTC |
| | | TCTCTCTGCGGGTCT |
| SEQ ID | GI 117606529 EF064739 Homo sapiens | CTGAGGCCTTGAAGG |
| NO: 3433 | Fas ligand | CTGTTATCAGAAAAT |
| | (TNF superfamily, member 6) | TGTGGGCGGAAACTT |
| | (FASLG) gene, complete cds | CCAGGGGTTTGCTCT |
| SEQ ID | GI 1139695586 NG_052809 Homo sapiens | AGGAGGGGCAAAATT |
| NO: 3434 | B-cell CLL/lymphoma 3 | GCTCCCCTCAATTGA |
| | (BCL3), RefSeqGene on chromosome 19 | GAATCTAGACAGAGG |
| | | AGGGAGTCATGCTGC |
| SEQ ID | GI 974987494 NG_011716 Homo sapiens | TGGACCACGAAGGGA |
| NO: 3435 | transcription factor 4 | AAGCAGAGGTAAGGT |
| | (TCF4), RefSeqGene on chromosome 18 | CAGAGTCTCCCCAAA |
| | | GTGGTCTATCCTGAG |
| SEQ ID | GI 572873826 NM_001130080 Homo sapiens | CTTGTGGCTACTCTG |
| NO: 3436 | interferon alpha inducible protein 27 | CAGTCACTGGGAGCA |
| | (IFI27), transcript variant 1, mRNA | ACTGGACTCTCCGGA |
| | | TTGACCAAGTTCATC |
| SEQ ID | GI 206725550 NM_004958 Homo sapiens | TTGGCCCTCACCTCA |
| NO: 3437 | mechanistic target of rapamycin | CAAGACATCGCTGAA |
| | (MTOR), mRNA | GTCACACAGACCCTC |
| | | TTAAACTTGGCTGAA |
| SEQ ID | GI 195222745 NM_018290 Homo sapiens | GAGAAGAACCAGGAT |
| NO: 3438 | phosphoglucomutase 2 | CGCAGTGCTCTCAAA |
| | (PGM2), mRNA | GACACGTACATGTTG |
| | | TCCAGCACCGTCTCC |
| SEQ ID | GI 590122055 NM_021649 Homo sapiens | GGCCCCAGGAGATCT |
| NO: 3439 | toll like receptor adaptor molecule 2 | GATCACACTTCCTCC |
| | (TICAM2), mRNA | TGAGGCACCTCTCAT |
| | | GGATGTTGCAATAAG |
| SEQ ID | GI 1025812269 NG_047054 Homo sapiens | TCTCCTAGCCTGCTT |
| NO: 3440 | glutathione peroxidase 5 | TGTGCAAACAAGTCC |
| | (GPX5), RefSeqGene on chromosome 6 | CAAGCAGGAGAAGAT |
| | | GAAGGTGAGTGAGCT |
| SEQ ID | GI 1140392578 NG_052831 Homo sapiens | CAGACAGGAAGGGAT |
| NO: 3441 | glutamate metabotropic receptor 5 | CTCAACTGCTACCCT |
| | (GRM5), RefSeqGene on chromosome 11 | CTGCATGAGTTTGCC |
| | | TTCTTGGGCTCAGAG |
| SEQ ID | GI 300116282 NG_023271 Homo sapiens | ATGAGAAAGGGTGAG |
| NO: 3442 | regenerating family member 1 alpha | GTGGGGGCCCTAAGT |
| | (REGIA), RefSeqGene on chromosome 2 | TTCTGCTCTTCCAAG |
| | | GCTCCTCCAATATTT |
| SEQ ID | GI 193083137 NM_005512 Homo sapiens | GAAGAGTGAGGACTG |
| NO: 3443 | leucine rich repeat containing 32 | ACTCAAGGTCACACA |
| | (LRRC32), transcript variant 1, mRNA | GTGATCCGGGATCCC |
| | | AGAACTCTGGTCTCC |
| SEQ ID | GI 225579056 NM_003049 Homo sapiens | AAGGGAGGGATGATC |
| NO: 3444 | solute carrier family 10 member 1 | ATCATTCTCTTGTGC |
| | (SLC10A1), mRNA | AGTGTGGCCGTCACA |
| | | GTTCTCTCTGCCATC |
| SEQ ID | GI 313661479 NM_145725 Homo sapiens | GGCCGTTTAAGCAGA |
| NO: 3445 | TNF receptor associated factor 3 | AAGTGACACTCATGC |
| | (TRAF3), transcript variant 1, mRNA | TGATGGATCAGGGGT |
| | | CCTCTCGACGTCATT |
| SEQ ID | GI 67515408 DQ080435 Homo sapiens | GAGCCAAGGTCTGTG |
| NO: 3446 | calcitonin/calcitonin- | GGCTCCTAGAACTTC |
| | related polypeptide, alpha | GAACTGGCGCAGGTG |
| | (CALCA) gene, complete cds | GTTTATCTCATTCTT |
| SEQ ID | GI 349585381 NG_030049 Homo sapiens | TGATGTTTCCTTCCT |
| NO: 3447 | checkpoint kinase 1 | GCCCTCCACCCTACC |
| | (CHEK1), RefSeqGene on chromosome 11 | TGATGAGGGGCCTTG |
| | | CTTTACTTTCATCTC |
| SEQ ID | GI 283945491 NG_016362 Homo sapiens | TGGTGGGAAATTTGT |
| NO: 3448 | C-X3-C motif chemokine receptor 1 | TGGTAGTGTTTGCCC |
| | (CX3CR1), RefSeqGene on chromosome 3 | TCACCAACAGCAAGA |
| | | AGCCCAAGAGTGTCA |
| SEQ ID | GI 982742415 NM_020530 Homo sapiens | ACAGATCTCATGCAG |
| NO: 3449 | oncostatin M | GACACCAGCAGACTC |
| | (OSM), transcript variant 1, mRNA | CTGGACCCCTATATA |
| | | CGTATCCAAGGCCTG |
| SEQ ID | GI 153791376 NM_024310 Homo sapiens | CAGTGCCTTTTTGCT |
| NO: 3450 | pleckstrin homology and | GGACACTGTGTCCTT |
| | FYVE domain containing 1 | ATGGCTTCACTGCAG |
| | (PLEKHF1), mRNA | GTAATGCCTTTCCCT |
| SEQ ID | GI 48762927 NM_002881 Homo sapiens | TGAATGCATGTGTCT |
| NO: 3451 | RAS like proto-oncogene B | GTCTGATCAGCATCA |
| | (RALB), mRNA | CTGCACACGGAGGTC |
| | | TAGTGAGCCTCTTGC |
| SEQ ID | GI 32140476 AY316305 Homo sapiens | TTGGTAGGGCACAAA |
| NO: 3452 | glutathione transferase zeta 1 | TGAGCACCTCTCTGG |
| | (maleylacetoacetate isomerase) | AAGGCATCATGCTAG |
| | (GSTZ1) gene, complete cds | GCGTTAGGGATATGG |
| SEQ ID | GI 46091142 AB110934 Homo sapiens | AAGTATACCCCTCTG |
| NO: 3453 | MRPS18B gene for MRPS18B protein, | CTAGGGCAGATGCAG |
| | complete cds, cell_line: LKT3 | CTTCATAGTCCTTGT |
| | | TCAGCACTGCACAGC |
| SEQ ID | GI 3403164 AFO27148 Homo sapiens | TGGGACTGAGGTGTG |
| NO: 3454 | myogenic determining factor 3 | GACGTACCTAACTTA |
| | (MYOD1) gene, complete cds | GAATATGAGCAGGTG |
| | | GGACGCATCTGTGGT |
| SEQ ID | GI 209529670 NG_008721 Homo sapiens | CTTCGAGGACCTGTA |
| NO: 3455 | LIF, interleukin 6 family cytokine | AGATACCAGCTGCCA |
| | (LIF), RefSeqGene on chromosome 22 | AGGTCTCTGTTGCCC |
| | | AGGAATGTCCTGTTG |
| SEQ ID | GI 240255451 NG_012330 Homo sapiens | GCAGCTTGATGTGTC |
| NO: 3456 | MYB proto-oncogene, transcription factor | TGCCATTGGCACTGT |
| | (MYB), RefSeqGene on chromosome 6 | GCAACACCACGACTT |
| | | TTCGTGCAAGATTTT |
| SEQ ID | GI 1140398720 NG_052834 Homo sapiens | GTCCCTGCGCCATGT |
| NO: 3457 | TNF receptor superfamily member 9 | ATTCAATACGTCGTC |
| | (TNFRSF9), RefSeqGene on chromosome 1 | TTTCTCCTGCGGGTC |
| | | TGCAATCTCACCTAC |
| SEQ ID | GI 116006947 NM_001285 Homo sapiens | AGAACATCCTCGGGA |
| NO: 3458 | chloride channel accessory 1 | GGCTCATTTGTGGCT |
| | (CLCA1), mRNA | TCTGATGTCCCAAAT |
| | | GCTCCCATACCTGAT |
| SEQ ID | GI 306140488 NM_030956 Homo sapiens | ATACTTGGAATGGCC |
| NO: 3459 | toll like receptor 10 | CAAGGATAGGCGTAA |
| | (TLR10), transcript variant 1, mRNA | ATGTGGGCTTTTCTG |
| | | GGCAAACCTTCGAGC |
| SEQ ID | GI 1015809708 NM_003807 Homo sapiens | CACATTTTCAGAAGC |
| NO: 3460 | TNF superfamily member 14 | CTCTGGAAAGTCGTG |
| | (TNFSF14), transcript variant 1, mRNA | CACAGCCCAGGAGTG |
| | | TTGAGCAATTTCGGT |
| SEQ ID | GI 167887714 EF445034 Homo sapiens | TGAAGCCAGGTACGA |
| NO: 3461 | transgelin | GCAAGATGAGAGTGG |
| | (TAGLN) gene, complete cds, alternatively spliced | GTTATCTCTGGAGTG |
| | | ACAGAGGCTGGTCTG |
| SEQ ID | GI 283837772 NG_016339 Homo sapiens | CGTTCTGTGACTTCT |
| NO: 3462 | A-Raf proto-oncogene, serine/threonine kinase | GCCTTAAGTTTCTGT |
| | (ARAF), RefSeqGene on chromosome X | TCCATGGCTTCCGTT |
| | | GCCAAACCTGTGGCT |
| SEQ ID | GI 1032528813 NG_050736 Homo sapiens | CTTTTTACTCCCACC |
| NO: 3463 | complement C3a receptor 1 | AACGCCATGTACCTG |
| | (C3AR1), RefSeqGene on chromosome 12 | TGCCATTTAGTTGTG |
| | | TTGGGCTCACCTCCC |
| SEQ ID | GI 1028908919 NG_050629 Homo sapiens | ATTTTTGTTGCGCCT |
| NO: 3464 | neurotrophin 3 | ACGAACCAAATGCCC |
| | (NTF3), RefSeqGene on chromosome 12 | CCGTCACTCTCTGCC |
| | | ATTGTTTAGCAGTCT |
| SEQ ID | GI 238637280 NG_012233 Homo sapiens | CCATCAGGGTGAGGG |
| NO: 3465 | pyruvate dehyrogenase | CATCTCAGACCCACA |
| | phosphatase catalytic subunit 1 | TGCAGGTTTATTTTA |
| | (PDP1), RefSeqGene on chromosom [symbol] | AGCTTCTTGGCTGGC |
| SEQ ID | GI 166795249 NM_006845 Homo sapiens | GGGAGCTGGAGGAGA |
| NO: 3466 | kinesin family member 2C | AGGCTATGGAAGAGC |
| | (KIF2C), transcript variant 1, mRNA | TCAAGGAGATCATAC |
| | | AGCAAGGACCAGACT |
| SEQ ID | GI 558472802 NM_001042600 Homo sapiens | ATCCCAGCCTGGGCT |
| NO: 3467 | mitogen-activated protein kinase | GAATCGAGGCCTGAT |
| | kinase kinase kinase 1 | CCTGGATCTTCTTGA |
| | (MAP4K1), transcript variant 1, | CAAACTGAAGAATCC |
| SEQ ID | GI 542029075 NM_006440 Homo sapiens | TCACGTGAAATCCTT |
| NO: 3468 | thioredoxin reductase 2 | GAACTGGGGCCACCG |
| | (TXNRD2), transcript variant 1, mRNA | TGTCCAGCTTCAGGA |
| | | CAGAAAAGTCAAGTA |
| SEQ ID | GI 1213447 U48869 Human cdk-inhibitor p57/KIP2 | AATCGCCGTGGTGTT |
| NO: 3469 | (CDKNIC) gene, complete cds | GTTGAAACTGAAAAT |
| | | ACTACATTATGCTAA |
| | | TCGCGGCCGGGCCCG |
| SEQ ID | GI 22001412 AF531102 Homo sapiens | AAACACCAGTTACTG |
| NO: 3470 | interleukin 1 receptor, type 1 | TCACCAGCCACTAAG |
| | (IL1R1) gene, complete cds | GAGAAACTGCAAAGA |
| | | GAGGCTCACGTGCCT |
| SEQ ID | GI 4588599 AF111163 Homo sapiens | CTCTTTCCTTGGCAT |
| NO: 3471 | pyrin | CACCTGCTAGATCTA |
| | (MEFV) gene, complete cds | TGTCTGTGCAGGAGG |
| | | AACAGCACAAGGCCA |
| SEQ ID | GI 238018114 NG_012216 Homo sapiens | GTGAAGCTCTTTTGC |
| NO: 3472 | B-cell CLL/lymphoma 10 | ATAAGGGGGCTTGAG |
| | (BCL10), RefSeqGene on chromosome 1 | GAAGCTCAACAGCTG |
| | | AAAGCACAACCTGGA |
| SEQ ID | GI 1033837679 NG_008338 Homo sapiens | CCTTCAGTTGTCAAG |
| NO: 3473 | cytochrome P450family 7 subfamily B member 1 | TCCAACAGCTGCACT |
| | (CYP7B1), RefSeqGene on chromosome 8 [symbol] | GCAACTGTGAAAAGC |
| | | CTTTCTCCCTGCTGA |
| SEQ ID | GI 237820700 NG_012083 Homo sapiens | CAGTTGTACAGGTTG |
| NO: 3474 | intercellular adhesion molecule 1 | TACACTGCAGGAGAG |
| | (ICAM1), RefSeqGene on chromosome 19 | TGCCTGGCAAAAAGA |
| | | TCAAATGGGGCTGGG |
| SEQ ID | GI 254826724 NG_012488 Homo sapiens | TCTTTTGTGGGCCTG |
| NO: 3475 | prostaglandin E synthase 2 | GTGGGAGCAACTCTG |
| | (PTGES2), RefSeqGene on chromosome 9 | ACCTCAGGGATTGCT |
| | | TTCTCGTCTATCATG |
| SEQ ID | GI 1049480218 NG_051308 Homo sapiens | TCCACCTCCCCTTCC |
| NO: 3476 | ras homolog family member A | ATTAGGGTTCTTTCT |
| | (RHOA), RefSeqGene on chromosome 3 | TTTGGGCACCCTCAT |
| | | ACCCTTGCCATAGTT |
| SEQ ID | GI 167614484 NM_006111 Homo sapiens | GGAGGAACCGAAAGC |
| NO: 3477 | acetyl-CoA acyltransferase 2 | ATGAGCCAAGCTCCC |
| | (ACAA2), mRNA | TACTGTGTCAGAAAT |
| | | GTGCGTTTTGGAACC |
| SEQ ID | GI 53759124 NM_001295 Homo sapiens | GGAATTCACTCACCA |
| NO: 3478 | C-C motif chemokine receptor 1 | CACCTGCAGCCTTCA |
| | (CCR1), mRNA | CTTTCCTCACGAAAG |
| | | CCTACGAGAGTGGAA |
| SEQ ID | GI 665505917 NM_006145 Homo sapiens | CCATGGAGACCCTCA |
| NO: 3479 | DnaJ heat shock protein family | TGCCATGTTTGCTGA |
| | (Hsp40) member B1 | GTTCTTCGGTGGCAG |
| | (DNAJB1), transcript variant 1, mRNA | AAATCCCTTTGACAC |
| SEQ ID | GI 41353192 AY486465 Homo sapiens | GGAGATGCACAGTGA |
| NO: 3480 | glutathione transferase kappa 1 | GAGAAAAGAGAGCAT |
| | (GSTK1) gene, complete cds | CTTAGAAACAGGAAG |
| | | GCACCTGGGGCCACA |
| SEQ ID | GI 37654535 AY434089 Homo sapiens | AGGGCTTTTTTCTGT |
| NO: 3481 | insulin-like growth factor binding protein 1 | GTCAATTAAAGAGCC |
| | (IGFBP1) gene, complete cds | TGGCCAGCTGGACCT |
| | | GGGCTGTCTlTTTGA |
| SEQ ID | GI 983173900 NG_009770 Homo sapiens | AGAAGTGCCAGCCTT |
| NO: 3482 | hexosaminidase subunit beta | ACTGTCTGCAACAGT |
| | (HEXB), RefSeqGene on chromosome 5 | TCTGGGAGGTAGCAA |
| | | TAGCGCTTCTTCAGG |
| SEQ ID | GI 1047225539 NM_001201 Homo sapiens | CTCTTCCCCCACAAG |
| NO: 3483 | bone morphogenetic protein 3 | TAATCTCTCTACCCC |
| | (BMP3), mRNA | ATGCAGTGTGCACAC |
| | | ACACACACACACAGT |
| SEQ ID | GI 403420573 NM_182619 Homo sapiens | TCACCTTCATGGTCC |
| NO: 3484 | C-type lectin domain family 18 member A | AGGACACTCTCTGGA |
| | (CLEC18A), transcript variant 1, mRNA | AGTTCTGGGTCTCCC |
| | | CAAGAAGAGGAAGAC |
| SEQ ID | GI 402794166 NM_002382 Homo sapiens | ACCGAGGTTTCAATC |
| NO: 3485 | MYC associated factor X | TGCGGCTGACAAACG |
| | (MAX), transcript variant 1, mRNA | GGCTCATCATAATGC |
| | | ACTGGAACGAAAACG |
| SEQ ID | GI 1003088850 NM_007368 Homo sapiens | GCTGAGGGGTCAGTT |
| NO: 3486 | RAS p21 protein activator 3 | TTATGGCTGGGAGGT |
| | (RASA3), transcript variant 1, mRNA | GCAGAATTACACAGA |
| | | AGTCCCAGTCTGAGG |
| SEQ ID | GI 73858577 NM_003255 Homo sapiens | TGATCAGGGCCAAAG |
| NO: 3487 | TIMP metallopeptidase inhibitor 2 | CGGTCAGTGAGAAGG |
| | (TIMP2), mRNA | AAGTGGACTCTGGAA |
| | | ACGACATTTATGGCA |
| SEQ ID | GI 343790995 NG_029773 Homo sapiens | CCCAGAAGACCTTCA |
| NO: 3488 | activating transcription factor 6 | GGTGACTGGGCAGTC |
| | (ATF6), RefSeqGene on chromosome 1 | TTATCATGGGATATT |
| | | TCTTCTGGCCCTGCC |
| SEQ ID | GI 205277388 NG_008604 Homo sapiens | TCCAGTAGACAAAGC |
| NO: 3489 | polycystin 2, transient receptor | AGCCTTTGCTGGCTT |
| | potential cation channel | CTGAGCAAGCCTGTA |
| | (PKD2), RefSeqGene on chromosom [symbol] | GGCAAAGAAATGCAG |
| SEQ ID | GI 746815960 NM_004929 Homo sapiens | ATCCCACCTGCAGTC |
| NO: 3490 | calbindin 1 | ATCCCTCATCACAGC |
| | (CALB1), mRNA | CTCACAGTTTTTCGA |
| | | GATCTGGCTCCATTT |
| SEQ ID | GI 403420573 NM_182619 Homo sapiens | GGATCGACGGAGACT |
| NO: 3491 | C-type lectin domain family 18 member A | GCTTCATGGTGTCTT |
| | (CLEC18A), transcript variant 1, mRNA | CAGAGGCAGACACCT |
| | | ATTACAGAGCCAGGA |
| SEQ ID | GI 658309997 NM_000853 Homo sapiens | CTGCGCATCGTGGAT |
| NO: 3492 | glutathione S-transferase theta l | CTGATTAAAGGTCAG |
| | (GSTT1), transcript variant 1, mRNA | CACTTAAGCGATGCC |
| | | TTTGCCCAGGTGAAC |
| SEQ ID | GI 83699680 DQ314887 Homo sapiens | GTGATGCTGTGGCCT |
| NO: 3493 | v-rel reticuloendotheliosis viral oncogene | TCTCAGTGTCTCACA |
| | homolog B, nuclear factor of | TCAAGGGACGTGGGA |
| | kappa light polypeptide [symbol] | TGTCGTTATTCCCAA |
| SEQ ID | GI 32263624 AY325800 Homo sapiens | AAGGGTGATGGGGAC |
| NO: 3494 | stannin | GTCTTCGGGGTATTT |
| | (SNN) gene, complete cds | CACACTTAGGTCCTT |
| | | TCTGGAGAGAGAGGG |
| SEQ ID | GI 209977025 NG_008836 Homo sapiens | ACTTACAGCTGCAGG |
| NO: 3495 | angiotensinogen | CAGGAGCATGTCTTA |
| | (AGT), RefSeqGene on chromosome 1 | ATCTGCTTGGGCTGC |
| | | CATAAGTACCACAGA |
| SEQ ID | GI 1024336774 NG_046918 Homo sapiens | GAGATGAGCAGAGGA |
| NO: 3496 | DExD/H-box helicase 58 | GGAAAAGAGACTGGG |
| | (DDX58), RefSeqGene on chromosome 9 | AAAGAGTGCCACATA |
| | | TGTGGGCAAGGAGGC |
| SEQ ID | GI 267844874 NG_015840 Homo sapiens | GGATATGTGCTCAGC |
| NO: 3497 | interferon gamma | TTTCACTATTGCTGG |
| | (IFNG), RefSeqGene on chromosome 12 | GCCTGCCTCTCACTC |
| | | CTCTCATGTAAGCCC |
| SEQ ID | GI 239787846 NG_012306 Homo sapiens | AATTCGTGACACTGG |
| NO: 3498 | interferon regulatory factor 5 | TGTCACCATTCTCCT |
| | (IRF5), RefSeqGene on chromosome 7 | TTACAGATGGGAAAT |
| | | GGGGCTTCTGGGGGA |
| SEQ ID | GI 193290114 NG_008154 Homo sapiens | CTTGGCTGAGCACAG |
| NO: 3499 | insulin receptor substrate 2 | AGAATGGGATGTTTC |
| | (IRS2), RefSeqGene on chromosome 13 | ACGGGATGTCTCTGC |
| | | TGCGACAGTGGATAT |
| SEQ ID | GI 38261972 NM_024551 Homo sapiens | TCCCTTTGAGAAAGC |
| NO: 3500 | adiponectin receptor 2 | ATAGTCCAGCAGGAC |
| | (ADIPOR2), mRNA | AGTGGCCATTTGGAC |
| | | AGAAGCCCACTTAGT |
| SEQ ID | GI 388596695 NM_001227 Homo sapiens | GCCAGGCACTTTGAG |
| NO: 3501 | caspase 7 | TCTCAGTCTGATGAC |
| | (CASP7), transcript variant a, mRNA | CCACACTTCCATGAG |
| | | AAGAAGCAGATCCCC |
| SEQ ID | GI 117422442 NM_001242 Homo sapiens | CAGATGTGTGAGCCA |
| NO: 3502 | CD27 molecule | GGAACATTCCTCGTG |
| | (CD27), mRNA | AAGGACTGTGACCAG |
| | | CATAGAAAGGCTGCT |
| SEQ ID | GI 1024336732 NM_006218 Homo sapiens | TTTTTGAGAAGAGGG |
| NO: 3503 | phosphatidylinositol-4,5-bisphosphate | GAATGTGAGGGGAGG |
| | 3-kinase catalytic subunit alpha | GGGCAGAACAGGGAG |
| | (PIK3CA), mRNA | GAGTTGTTTGAATGA |
| SEQ ID | GI 1036029324 AHO13155 Homo sapiens | TTCCTAAGTCCTCCA |
| NO: 3504 | chromosome 19 poliovirus receptor related 2 | GGATGAAGGGAGCTT |
| | (PVRL2) gene, | GCATTTTGGCAATTT |
| | | GGAGTCTCCGGGAGT |
| SEQ ID | GI 290543602 GU130197 Homo sapiens | CCTGGTTTATTTTCT |
| NO: 3505 | isolate MIA060410 Duffy antigen/chemokine receptor | GGTGGCCTCATGGGG |
| | (DARC) gene, complete cds | TGGTTCTAGGACTGG |
| | | ATTTCCTGGTGAGGT |
| SEQ ID | GI 14488404 AF385628 Homo sapiens | AGACTGCTCCTGAGA |
| NO: 3506 | interleukin 8 | CTGAGAAAGGCAGCT |
| | (IL8) gene, complete cds | CTGACGGGATCTCAG |
| | | ATTTTAGCAGCAGGA |
| SEQ ID | GI 1101010097 NG_052015 Homo sapiens | AAGGAGCAGGCCGTG |
| NO: 3507 | adenosine deaminase, RNA specific B1 | GAGCTCTTGTCTATT |
| | (ADARB1), RefSeqGene on chromosome 21 | CCTTTTGTCAGAGAC |
| | | ATTGTGGAAGCCCTC |
| SEQ ID | GI 256220780 NG_012741 Homo sapiens | CTGACCAATTTGAAT |
| NO: 3508 | very low density lipoprotein receptor | GTGAGGATGGCAGCT |
| | (VLDLR), RefSeqGene on chromosome 9 | GCATCCATGGCAGCA |
| | | GGCAGTGTAATGGTA |
| SEQ ID | GI 608785172 KJ534783 Homo sapiens | TTTGACTATGACCCC |
| NO: 3509 | clone BZRAPl_iso-A_adult-A09 | GTGTCAATGTCGCCC |
| | benzodiazapine receptor peripheral- | AATCCTGATGCTGGA |
| | associated protein l isofo [symbol] | GAAGAAGAGCTTCCC |
| SEQ ID | GI 1006833939 NM_003978 Homo sapiens | CTTTTTCTCCTGCTC |
| NO: 3510 | proline-serine-threonine | CAGTGTCCGAGTGCT |
| | phosphatase interacting protein 1 | CAGTTCAGAGGAGGC |
| | (PSTPIP1), transcript variant 1, [symbol] | AAAGGAACAAGGGAA |
| SEQ ID | GI 19718735 NM_003265 Homo sapiens | CACTGTTAGCCATGA |
| NO: 3511 | toll like receptor 3 | AGTTGCTGACTGCAG |
| | (TLR3), mRNA | CCACCTGAAGTTGAC |
| | | TCAGGTACCCGATGA |
| SEQ ID | GI 117606575 EF064762 Homo sapiens | CGCACAGCCAAGTGA |
| NO: 3512 | chemokine | TGAAGAAGGTCTATG |
| | (C-C motif) ligand 27 | ACAAGCCCGAGGAAC |
| | (CCL27) gene, complete cds | CTGGGAGATTTCCTT |
| SEQ ID | GI 339639570 NG_029386 Homo sapiens | GAGTCAGTTAAGACC |
| NO: 3513 | complement component 4 binding protein beta | AGTTCCTTGCTGGGA |
| | (C4BPB), RefSeqGene on chromosome 1 | AGCCCTAACTCTGGA |
| | | GGGACAGAGACAGGT |
| SEQ ID | GI 429535873 NG_033024 Homo sapiens | ACCAGTGAGGTAAGA |
| NO: 3514 | colony stimulating factor 2 | AACAGCTGCCCCGGG |
| | (CSF2), RefSeqGene on chromosome 5 | ACCTTTCATACCACA |
| | | TTTGAACAGGGAGAG |
| SEQ ID | GI 237820700 NG_012083 Homo sapiens | TCCCAGAATCTCCCT |
| NO: 3515 | intercellular adhesion molecule 1 | TGGAGAATGTATGGA |
| | (ICAM1), RefSeqGene on chromosome 19 | GCCAGTGTCCTCACA |
| | | CCCCCATCCAAGATA |
| SEQ ID | GI 292658838 NG_016860 Homo sapiens | CTTCCTTCTCCTAGG |
| NO: 3516 | pyruvate dehydrogenase | TCCTGCGTTCAATTT |
| | (lipoamide) beta | CCTGGATGCTCCTGC |
| | (PDHB), RefSeqGene on chromosome 3 | TGTTCGTGTCACTGG |
| SEQ ID | GI 340523097 NG_029467 Homo sapiens | TCTCACCAGAATCCA |
| NO: 3517 | protein tyrosine kinase 2 | AGATTTGATCCCTTG |
| | (PTK2), RefSeqGene on chromosome 8 | CTGCCGAAAGCTCTG |
| | | CTGGTTTCTCTCCCA |
| SEQ ID | GI 262331561 NG_013364 Homo sapiens | CGCTGAGTGGGGCTT |
| NO: 3518 | transforming growth factor beta 1 | AGCATTTCACCAATG |
| | (TGFB1), RefSeqGene on chromosome 19 | AGGAAACAGGCCTCG |
| | | AGAAGGCAAGAAAAC |
| SEQ ID | GI 122937306 NM_001080454 Homo sapiens | ATCCAGCAGTTGTTG |
| NO: 3519 | acyl-CoA synthetase | AATCGGCTGTTGTCA |
| | medium chain family member 4 | GTAGTCCAGATCAAA |
| | (ACSM4), mRNA | TCCGCGGAGAGGTGG |
| SEQ ID | GI 336455032 NG_029156 Homo sapiens | GGCCTGAGCTAGAAG |
| NO: 3520 | betaine-homocysteine S-methyltransferase | GAAGCAAAGGAAATA |
| | (BHMT), RefSeqGene on chromosome 5 | GAAGGGCAGAAGTGG |
| | | AGCCTGCAGAGTGAG |
| SEQ ID | GI 193290109 NG_008150 Homo sapiens | CTGAGCTTCGCTTTG |
| NO: 3521 | checkpoint kinase 2 | TCTGTAGTTTTGAGC |
| | (CHEK2), RefSeqGene on chromosome 22 | TGAAGGGGGAGTGTG |
| | | TGGGCGACTCTCTTC |
| SEQ ID | GI 260593639 NG_013007 Homo sapiens | GTGGCTGCTTTCACA |
| NO: 3522 | C-reactive protein | GGCTGGCATTGAACA |
| | (CRP), RefSeqGene on chromosome 1 | CTTGCAAGCTTTTCT |
| | | AAGCACAAGGTGCAA |
| SEQ ID | GI 916539820 NG_042809 Homo sapiens | TCTGTGAAATGGGGA |
| NO: 3523 | potassium voltage-gated | GCCAGCCTTCTTGCT |
| | channel subfamily J member 12 | TGCTAAGGCCTCTTC |
| | (KCNJ12), RefSeqGene on chromos [symbol] | CAGCAAAACAGTTTC |
| SEQ ID | GI 237858713 NG_012098 Homo sapiens | TGTCACATTGAACTC |
| NO: 3524 | KIT ligand | TTCCCTCAGCGAAAG |
| | (KITLG), RefSeqGene on chromosome 12 | CATTTGCATTGCTTC |
| | | CCCAAGTCACTGCCA |
| SEQ ID | GI 47458816 NM_005622 Homo sapiens | CTGATGCTAGCTCGT |
| NO: 3525 | acyl-CoA synthetase medium chain family member 3 | GTCACCAGGAAGATG |
| | (ACSM3), transcript variant 1, mRNA | CTACGTCATGCCAAG |
| | | TGTTTTCAGCGCCTA |
| SEQ ID | GI 748585173 NM_198580 Homo sapiens | TCAGCCTCTGTCTCC |
| NO: 3526 | solute carrier family 27 member 1 | TTCCATCCCTGTCCC |
| | (SLC27A1), mRNA | TGTCTGGCCTTAACT |
| | | CTTCCCTCTTTTTCT |
| SEQ ID | GI 49066030 AY654286 Homo sapiens | TTCATGGTGCCTCAT |
| NO: 3527 | interferon | CCCTTGGGACCTGTG |
| | (alpha, beta and omega) receptor 1 | TTGCCACTGAGCCCT |
| | (IFNAR1) gene, complete cds | ATTAGCTCATATTCC |
| SEQ ID | GI 8308037 AF244139 Homo sapiens | TGTGTGCTCTTCCCC |
| NO: 3528 | integrin-linked kinase 1 | CTTTTCCCATGCCCT |
| | (ILK) gene, complete cds | GACACCAGTATCTCA |
| | | TTTGGAACTGACTGT |
| SEQ ID | GI 190194395 NG_008003 Homo sapiens | GGAGTGGTCAGAAAA |
| NO: 3529 | acyl-CoA dehydrogenase, short/branched chain | CTGCAACAAAAGGGG |
| | (ACADSB), RefSeqGene on chromosome 10 | ACTGAGGCCACTTTA |
| | | GGGAATTGGGGGTTG |
| SEQ ID | GI 224809264 NG_011470 Homo sapiens | GTGTGGTAGGTGAAT |
| NO: 3530 | nitric oxide synthase 2 | TGGAGGAGAGGACTT |
| | (NOS2), RefSeqGene on chromosome 17 | TGAAACCAGGCAGTC |
| | | TGGGCTATGGCAACT |
| SEQ ID | GI 429535866 NG_033016 Homo sapiens | ATTCCTCAGCTTCCG |
| NO: 3531 | receptor interacting serine/threonine kinase 2 | CCCTGCCAAAGTTAC |
| | (RIPK2), RefSeqGene on chromosome 8 | TGGATTTTCACCTGC |
| | | CTGTGGCTTTTCTTC |
| SEQ ID | GI 293597503 NG_016969 Homo sapiens | TGCAGTTGCAGAAGC |
| NO: 3532 | solute carrier family 6 member 2 | AGCCGTTTAAGACTG |
| | (SLC6A2), RefSeqGene on chromosome 16 | GAGTTTGAGTCTGAG |
| | | CTCTGCCTCTCAGTG |
| SEQ ID | GI 164695701 AK315511 Homo sapiens | AGCCAAACCTACCAG |
| NO: 3533 | cDNA, FLI96576, Homo sapiens | CAGCAATATGGACGG |
| | annexin A4 | AGCCTTGAAGATGAC |
| | (ANXA4), mRNA | ATTCGCTCTGACACA |
| SEQ ID | GI 237858728 NG_012105 Homo sapiens | TTTGAAAACATGGGC |
| NO: 3534 | ornithine decarboxylase 1 | GCTTACACTGTTGCT |
| | (ODC1), RefSeqGene on chromosome 2 | GCTGCCTCTACGTTC |
| | | AATGGCTTCCAGAGG |
| SEQ ID | GI 32815079 AY338491 Homo sapiens | TTGTTCTGTGCAAGG |
| NO: 3535 | cyclin B1 | CCATTTATGCAAAGC |
| | (CCNB1) gene, complete cds | AACCCCTCAAGTGGC |
| | | AGAGGAGCTGAGAAA |
| SEQ ID | GI 1036032792 AH002827 Homo sapiens | ATCTCAGAGAGATGG |
| NO: 3536 | hemopexin | AAGAATTTCCCCAGC |
| | (HPX) gene, complete cds | CCTGTGGATGCTGCA |
| | | TTCCGTCAAGGTCAC |
| SEQ ID | GI 197116369 NG_008383 Homo sapiens | GGGGAGGTGTTATGG |
| NO: 3537 | cytochrome P450 family 2 subfamily E member 1 | TCTGTGCTGAACACC |
| | (CYP2E1), RefSeqGene on chromosome 10 [symbol] | TGGTACTCTTGCACA |
| | | CTGGTTGGTCCATAC |
| SEQ ID | GI 334848115 NG_029039 Homo sapiens | AGTGCACACCTGTAT |
| NO: 3538 | major histocompatibility complex, class 1, G | CCTAACATTTGAGGA |
| | (HLA-G), RefSeqGene on chromosome 6 | GCTGACACAGGAGGA |
| | | ACACTTGCAGCCAGG |
| SEQ ID | GI 308210781 NG_027799 Homo sapiens | AGCACATCACTTTTG |
| NO: 3539 | interferon related developmental regulator 1 | CATCTAGTTCCTTGG |
| | (IFRD1), RefSeqGene on chromosome 7 | CTTACCAGCCACCTG |
| | | GAGGCTGGGAATAGT |
| SEQ ID | GI 429535870 NG_033021 Homo sapiens | AGGATGCCCAAATTC |
| NO: 3540 | interleukin 17A | TGAGGACAAGAACTT |
| | (IL17A), RefSeqGene on chromosome 6 | CCCCCGGACTGTGAT |
| | | GGTCAACCTGAACAT |
| SEQ ID | GI 683524074 NG_034246 Homo sapiens | AAAGGAAATGTGGGG |
| NO: 3541 | lipase E, hormone sensitive type | AAGCAGATCCATGTG |
| | (LIPE), RefSeqGene on chromosome 19 | GCTACAGGTGCCAGA |
| | | CCCCTAGAAATGTGA |
| SEQ ID | GI 237858777 NG_012128 Homo sapiens | AGACCCAGCTCTCTG |
| NO: 3542 | solute carrier family 11 member 1 | CAGCTTAAATAGGGA |
| | (SLC11A1), RefSeqGene on chromosome 2 | GGGAGGTGAGCAGAC |
| | | AGGAATGAATACCCA |
| SEQ ID | GI 1216866445 NM_005302 Homo sapiens | GGGCATACCTTGCTG |
| NO: 3543 | G protein-coupled receptor 37 | GGACTCAACTTGGCT |
| | (GPR37), mRNA | GAGAAATGCACAAGA |
| | | TGCCAAAGGAGGAAG |
| SEQ ID | GI 219802033 NM_001143835 Homo sapiens | CCAAAGCAGTCTCCA |
| NO: 3544 | nuclear factor related to | CTGTTGTTGTGACTA |
| | kappaB binding protein | CAGCTCCGTCTCCTA |
| | (NFRKB), transcript variant 1, mRNA | AACAGGCACCTGAGC |
| SEQ ID | GI 30039658 AY273801 Homo sapiens | ATTGGCAGGCAACAT |
| NO: 3545 | breast cancer 1, early onset | GAATCCAGACTTCTA |
| | (BRCA1) gene, complete cds | GGCTGTCTTGCGGGC |
| | | TCTTTTTTGCCAGTC |
| SEQ ID | GI 3041866 U94788 Human p53 | GCACAGACCCTCTCA |
| NO: 3546 | (TP53) gene, complete cds | CTCATGTGATGTCAT |
| | | CTCTCCTCCCTGCTT |
| | | CTGTCTCCTACAGCC |
| SEQ ID | GI 1024846763 NG_046978 Homo sapiens | AGCATCTTTATATGC |
| NO: 3547 | Charcot-Leyden crystal galectin | ACAGTGAGCAGGTGT |
| | (CLC), RefSeqGene on chromosome 19 | GTGTGACTCAGTGAG |
| | | TGGCACGGCTCTGTG |
| SEQ ID | GI 335057570 NG_029067 Homo sapiens | GACCCCATGGACTGG |
| NO: 3548 | fibroblast growth factor 2 | GTTTGGTCTATGAGC |
| | (FGF2), RefSeqGene on chromosome 4 | AGCAGTATTCACTGG |
| | | AAGTCAACCTGGCTT |
| SEQ ID | GI 398303864 NG_032876 Homo sapiens | GCAGTCATGCTGGAT |
| NO: 3549 | major histocompatibility | AGGGAAGAAGGTGAG |
| | complex, class II, DQ alpha 1 | CTGGAAGAGGAACAG |
| | (HLA-DQA1), RefSeqGene on chromos [symbol] | ACAACTTGGACAGCC |
| SEQ ID | GI 1147592400 NG_029037 Homo sapiens | GTCACCTGCCTGGCC |
| NO: 3550 | reticulon 4 | CTAAGGACATTTGAG |
| | (RTN4), RefSeqGene on chromosome 2 | ACCTCCCTGTGTTCT |
| | | TCTCTTTGTCTTGGG |
| SEQ ID | GI 194294528 NG_008241 Homo sapiens | GGGGCTTTTCCCACA |
| NO: 3551 | succinate-CoA ligase | TGGACACCTGGTGAA |
| | ADP-forming beta subunit | GAGTATTCTAGGCAG |
| | (SUCLA2), RefSeqGene on chromosome 13 | AGGGTGCATTAGAGC |
| SEQ ID | GI 1024336758 NG_046923 Homo sapiens | GGCTACACTACAAAA |
| NO: 3552 | zinc fingers and homeoboxes 3 | GGCAAGAATGCCCAT |
| | (ZHX3), RefSeqGene on chromosome 20 | GTAAGGAGCCCAGCA |
| | | GTCTGGACAGATCCT |
| SEQ ID | GI 401709925 NM_015953 Homo sapiens | TGGCTACCTGTATGA |
| NO: 3553 | nitric oxide synthase interacting protein | GCGTGAGGCCATCCT |
| | (NOSIP), transcript variant 1, mRNA | GGAGTACATTCTGCA |
| | | CCAGAAGAAGGAGAT |
| SEQ ID | GI 189458805 NG_007981 Homo sapiens | ATTGGAGGAGGGAGG |
| NO: 3554 | ATP binding cassette subfamily A member 1 | GAGGGAAGGAAGCTG |
| | (ABCA1), RefSeqGene on chromosome 9 | TGTTGGTTTTCACAC |
| | | AGGGATTGATGGAAT |
| SEQ ID | GI 336391122 NG_029141 Homo sapiens | GGCCCCAGCCTAAAT |
| NO: 3555 | interferon gamma inducible protein 16 | CCCTTCCTAGAGCAA |
| | (IFI16), RefSeqGene on chromosome 1 | GTCCTCACTGGCAAC |
| | | CACGTTTCAGATTAG |
| SEQ ID | GI 24430203 NM_153480 Homo sapiens | AGCTCTGCTTCAAGT |
| NO: 3556 | interleukin 17 receptor E | TCTCTTTTGGAAACA |
| | (IL17RE), transcript variant 1, mRNA | GCAGCCATGTTGAAT |
| | | GCCCCCACCAGACTG |
| SEQ ID | GI 11342663 NM_002463 Homo sapiens | CGCTGCTTTCCTCGC |
| NO: 3557 | MX dynamin like GTPase 2 | CAAGGACTTCAACTT |
| | (MX2), mRNA | TCTCACTTTGAACAA |
| | | TCAGCCACCACCAGG |
| SEQ ID | GI 3403164 AFO27148 Homo sapiens | ACTCTGGAGTCTGCA |
| NO: 3558 | myogenic determining factor 3 | CTCAACTGGTCTGCA |
| | (MYOD1) gene, complete cds | AACCGACTCTCGGAG |
| | | ACTTCAGGTGAGATG |
| SEQ ID | GI 589269250 NG_007475 Homo sapiens | CTGCAGCTGCCCCAG |
| NO: 3559 | aquaporin 1 | GACTGCATGTATGTC |
| | (Colton blood group) | CATGGCAGAAGTAGG |
| | (AQP1), RefSeqGene on chromosome 7 | CAAGAGTTCTAGAAG |
| SEQ ID | GI 225543321 NG_011651 Homo sapiens | TGTGTAATAAGCAGA |
| NO: 3560 | NLRfamily pyrin domain containing 1 | TGCAAAGCCCTGGAC |
| | (NLRP1), RefSeqGene on chromosome 17 | CCCAGACCCACAGAA |
| | | ACATGCCTACCTCAT |
| SEQ ID | GI 51479142 NM_001003703 Homo sapiens | AAGGAAGCACAACGC |
| NO: 3561 | ATP synthase, H+ transporting, | CCCAATCCGCTTTGT |
| | mitochondrial Fo complex subunit F6 | TTTACACAGTCTCAC |
| | (ATP5J), transcript [symbol] | TTTCCCTGCACCTTT |
| SEQ ID | GI 343962631 NM_002037 Homo sapiens | CCCTGCAGTTGATCA |
| NO: 3562 | FYN proto-oncogene, Src family | AGAGACTGGGAAATG |
| | tyrosine kinase | GGCAGTTTGGGGAAG |
| | (FYN), transcript variant 1, mRNA | TATGGATGGGTACCT |
| SEQ ID | GI 117606573 EF064761 Homo sapiens | CTAGTTTGCAGGGGA |
| NO: 3563 | chemokine | AAGTCCTTCACAGGG |
| | (C-C motif) ligand 28 | AAGCATCTCACTGGA |
| | (CCL28) gene, complete cds | CATGCTGGGCTACAA |
| SEQ ID | GI 507834151 NG_008376 Homo sapiens | iTGAACAAGTGGACAA |
| NO: 3564 | cytochrome P450 family 2 | GTGTCTGGGAGTGGA |
| | subfamily D member 6 | CAAGAGATCTGTGCA |
| | (CYP2D6), RefSeqGene on chromosome 2: | CCATCAGGTGTGTGC |
| SEQ ID | GI 306482672 NG_027674 Homo sapiens | CAGAATCGGGTCCAC |
| NO: 3565 | DNA damage inducible transcript 3 | TGGGCAAAATACATG |
| | (DDIT3), RefSeqGene on chromosome 12 | ACTTCTGGCAGGCTG |
| | | AGGGCTTACCAACTA |
| SEQ ID | GI 237858805 NG_012139 Homo sapiens | CGTGAAAGTCAGACT |
| NO: 3566 | uncoupling protein 1 | TCAAGCACAGAGCCA |
| | (UCP1), RefSeqGene on chromosome 4 | TCTCCACGGAATCAA |
| | | ACCTCGCTACACGGG |
| SEQ ID | GI 215277008 NM_000851 Homo sapiens | TCAAAGTCCCCCTCC |
| NO: 3567 | glutathione S-transferase mu 5 | TAACGTCTTCCTTTC |
| | (GSTM5), mRNA | CCTGCACTAACGCCA |
| | | ACCTGACTGCTTTTC |
| SEQ ID | GI 4755084 AFO17178 Homo sapiens | AAGTAGCTTCTGAGA |
| NO: 3568 | pro alpha 1(1) collagen | GGGTGAGGGGTACAC |
| | (COL1A1) gene, complete cds | AGAGAGGGATTATGG |
| | | GAGAGGTCTCTGCCT |
| SEQ ID | GI 27357272 AY195619 Homo sapiens | GGACCCTCCATGTTT |
| NO: 3569 | interleukin 10 receptor, alpha | GCTGGGTATTAGCCA |
| | (IL10RA) gene, complete cds | AGCTGGTCCTGGGAG |
| | | AATGCAGATACTGTC |
| SEQ ID | GI 66841734 DQ073384 Homo sapiens | CTGCTTGGACACTTG |
| NO: 3570 | phosphatase and tensin homolog | GTGTAATAGCTGCTG |
| | (mutated in multiple advanced cancers 1) | CCACTATGCCTCGAA |
| | (PTEN) gene, comp [symbol] | ACTGGTGACTCTGCT |
| SEQ ID | GI 307611940 NG_027759 Homo sapiens | TGTATGCCACACAGA |
| NO: 3571 | caspase recruitment domain family member 11 | ACACTAGTTCGTGAG |
| | (CARD11), RefSeqGene on chromosome 7 | TTGCTCCATGAACCA |
| | | AGGGTGCCATGGTCA |
| SEQ ID | GI 1172222469 NG_053051 Homo sapiens | AACATTTGGGGCCGG |
| NO: 3572 | heat shock protein family H | CTAATCAATTGTGGG |
| | (HspllO) member 1 | GGCTGTCCTGTGCCT |
| | (HSPH1), RefSeqGene on chromosome 13 | TGTAGGATGTTTAAC |
| SEQ ID | GI 37675281 NM_020664 Homo sapiens | CCAAACGGTGTCAAA |
| NO: 3573 | 2,4-dienoyl-CoA reductase 2 | GGGCTGCCGGATTTC |
| | (DECR2), mRNA | GCATCCTTCTCTGCT |
| | | AAGCTCTAGGAATCT |
| SEQ ID | GI 40807361 NM_004637 Homo sapiens | GCTCCCTTCCTAGGA |
| NO: 3574 | RAB7A, member RAS oncogene family | TCTGCCCCTGCATTG |
| | (RAB7A), mRNA | TAGCTTGCTTAACGG |
| | | AGCACTTCTCCTTTT |
| SEQ ID | GI 10280531 AB038161 Homo sapiens | GAGGCTGTTAGACGC |
| NO: 3575 | ABCG1 gene for ABC transporter | TGTGGAGGAAAGGTG |
| | (ATP-binding cassette, sub-family G | GTCAACTGTATGCAT |
| | (WHITE), member 1), com | TGCTTTGCTGTTGGC |
| SEQ ID | GI 41324131 AY527817 Homo sapiens | TGCTAGTGTGTTTAG |
| NO: 3576 | arachidonate 12-lipoxygenase | AGGGCTGAGGATGTC |
| | (ALOX12) gene, complete cds | CCAAAGGCGAGGTGT |
| | | CTTCCCAGATACTGT |
| SEQ ID | GI 343962600 NG_029791 Homo sapiens | AGGTTCTGTTTACTT |
| NO: 3577 | TNF receptor superfamily member 1B | GTGACCCTGAGAAGG |
| | (TNFRSF1B), RefSeqGene on chromosome 1 | GGATGCCCTATGGGG |
| | | GCTCTTCTGAGATCA |
| SEQ ID | GI 498917180 NM_032375 Homo sapiens | ACTATGGGCTGATTA |
| NO: 3578 | AKT1 substrate 1 | AGCCCGGTTGGCTGC |
| | (AKT1S1), transcript variant 1, mRNA | CATGTTGTTAACGAG |
| | | CACCGATTTCCTCTA |
| SEQ ID | GI 166064064 NM_002831 Homo sapiens | CAGGGTGGGGGATCA |
| NO: 3579 | protein tyrosine phosphatase, | GGTGACCCATATTCG |
| | non-receptor type 6 | GATCCAGAACTCAGG |
| | (PTPN6), transcript variant 1, mRNA | GGATTTCTATGACCT |
| SEQ ID | GI 338797748 NM_006743 Homo sapiens | GTTGGGCAGAGATGC |
| NO: 3580 | RNA binding motif | ACTGAACTCATCTTT |
| | (RNP1, RRM) protein 3 | GTGTATGAGGGCCAT |
| | (RBM3), mRNA | GAGAGAGGCCTGGTT |
| SEQ ID | GI 124001557 NM_152586 Homo sapiens | CTGGGCAGCAGTACT |
| NO: 3581 | ubiquitin specific peptidase 54 | GACTTGGGGACTTCC |
| | (USP54), transcript variant 1, mRNA | TTGCCTTTGGATTCC |
| | | TGGGTGAATATCACA |
| SEQ ID | GI 117606557 EF064753 Homo sapiens | ACTGCTGACAAAAGA |
| NO: 3582 | CD40 ligand | GGGGGCTTCTGGTCT |
| | (TNF superfamily, member 5, | GGTTGGTTATTTGTG |
| | hyper-IgM syndrome) | TTTGGCCTGATGTGC |
| | (CD40LG) gene, complete cds [symbol] | |
| SEQ ID | GI 117606537 EF064743 Homo sapiens | TTTCCCTCATAGCAC |
| NO: 3583 | chemokine | CTTCAAGCCTTTCCC |
| | (C-X-C motif) ligand 13 | CAGTATAGCTCCAGG |
| | (B-cell chemoattractant) | GCCTGGGAAAACAAA |
| | (CXCL13) gene, complete cds | |
| SEQ ID | GI 224809353 NG_011513 Homo sapiens | CAGACAGAGCTACAT |
| NO: 3584 | ATP binding cassette subfamily B member 1 | GGAGTCTTGGCAGAG |
| | (ABCB1), RefSeqGene on chromosome 7 | ATGCTGCTCAGACAT |
| | | GCATGGAAACCCTGG |
| SEQ ID | GI 224451013 NG_009888 Homo sapiens | TATTCTCCACATGCG |
| NO: 3585 | acetyl-CoA acetyltransferase 1 | TAAGCAAGGGAGTAC |
| | (ACAT1), RefSeqGene on chromosome 11 | GCACCACAGATTGTC |
| | | AGGCAAAGCCTCAGG |
| SEQ ID | GI 324711016 NG_012837 Homo sapiens | AGTCTCTTCTTGCCT |
| NO: 3586 | GC, vitamin D binding protein | CATTTGCACCCCCCG |
| | (GC), RefSeqGene on chromosome 4 | GCAGCTCAAACCTAC |
| | | TTGTTTCAACAATGC |
| SEQ ID | GI 262331561 NG_013364 Homo sapiens | ACCCATTTTAAAGGT |
| NO: 3587 | transforming growth factor beta 1 | GAGGAAACAAGCCCA |
| | (TGFB1), RefSeqGene on chromosome 19 | GAGAGGTTAAGGGAG |
| | | GAGTTCCTGCCCACC |
| SEQ ID | GI 256220780 NG_012741 Homo sapiens | CCCTGGAGCTTCTAC |
| NO: 3588 | very low density lipoprotein receptor | ACATACCCCTTCTGT |
| | (VLDLR), RefSeqGene on chromosome 9 | CCACTGGCACATGGT |
| | | GCTGTTCCACAATAC |
| SEQ ID | GI 1057867548 NM_020661 Homo sapiens | ATTCAGTTCGTCTCT |
| NO: 3589 | activation induced cytidine deaminase | CCAGACAGCTTCGGC |
| | (AICDA), transcript variant 1, mRNA | GCATCCTTTTGCCCC |
| | | TGTATGAGGTTGATG |
| SEQ ID | GI 28144902 NM_016584 Homo sapiens | TGAGGGAACCAAACC |
| NO: 3590 | interleukin 23 subunit alpha | AGAGACGCGCTGAAC |
| | (IL23A), mRNA | AGAGAGAATCAGGCT |
| | | CAAAGCAAGTGGAAG |
| SEQ ID | GI 2828023 AF036905 Homo sapiens | GAGAACGAGGAACCA |
| NO: 3591 | linker for activation of T cells | GCCTGTGAGGATGCA |
| | (LAT) mRNA, complete cds | GATGAGGATGAGGAC |
| | | GACTATCACAACCCA |
| SEQ ID | GI 48762927 NM_002881 Homo sapiens | AGGGCTGGGTTGGTA |
| NO: 3592 | RAS like proto-oncogene B | AAGAGAAGGCTATGG |
| | (RALB), mRNA | TTGACTTCTTGCTTG |
| | | TGCTTCCCACTCTCC |
| SEQ ID | GI 209447071 NM_005639 Homo sapiens | TGTGTGTGTGTGTGT |
| NO: 3593 | synaptotagmin 1 | GTGTGTGTGTGTGTG |
| | (SYT1), transcript variant 1, mRNA | CACATTTGTTTGGGG |
| | | ATGGGGGAGAAGAAG |
| SEQ ID | GI 937628170 KP290484 Homo sapiens | TGATGCCTTTGTCAT |
| NO: 3594 | OR10J3 | CTCCCACTTCTTCTG |
| | (OR10J3) gene, complete cds | TGATGTGAGACACCT |
| | | GCTGAAGCTGGCCTG |
| SEQ ID | GI 237820683 NG_012068 Homo sapiens | AACACTGAGGCTGAG |
| NO: 3595 | forkhead box 11 | AAAAGCTAGATCACT |
| | (FOXIl), RefSeqGene on chromosome 5 | TGTCAGGGCCTGCAG |
| | | TGATCCCAAGGTTGG |
| SEQ ID | GI 293629222 NG_017001 Homo sapiens | TCTATGCCCCAAGGC |
| NO: 3596 | hepatitis A virus cellular receptor 1 | CATCTGCCACACTGC |
| | (HAVCR1), RefSeqGene on chromosome 5 | CTGTAGTGGTAGGAG |
| | | ACAACTACCTAGTTC |
| SEQ ID | GI 225007577 NG_011607 Homo sapiens | CAACCCAGGTGCCCC |
| NO: 3597 | MER proto-oncogene, tyrosine kinase | CTTGGTCATGAATGA |
| | (MERTK), RefSeqGene on chromosome 2 | TGGACTGCTCTCTCC |
| | | TTAAGGGTTGAGATG |
| SEQ ID | GI 285026427 NG_016458 Homo sapiens | CCAGGATTCACCCCT |
| NO: 3598 | protein kinase AMP-activated | ATTGGACTAATTCTG |
| | non-catalytic subunit gamma 3 | TCAATGCCCACTTCA |
| | (PRKAG3), RefSeqGene on chr [symbol] | CTGTGGCCAGAGGCA |
| SEQ ID | GI 94538326 NM_002038 Homo sapiens | TCAACCTCCCAAGTA |
| NO: 3599 | interferon alpha inducible protein 6 | GGATTACAAGCATGC |
| | (IFI6), transcript variant 1, mRNA | GCCGACGATGCCCAG |
| | | AATCCAGAACTTTGT |
| SEQ ID | GI 386781923 NM_002371 Homo sapiens | TGAAAACATTGCTGC |
| NO: 3600 | mal, T-cell differentiation protein | CGTGGTGTTCTCCTA |
| | (MAL), transcript variant a, mRNA | CATAGCCACTCTGCT |
| | | CTACGTGGTCCATGC |
| SEQ ID | GI 18765742 NM_003098 Homo sapiens | AAGCTGCAGATGTCT |
| NO: 3601 | syntrophin alpha 1 | TCAGATGACGGTGCC |
| | (SNTA1), mRNA | AGTCTCCTTTTCCTG |
| | | GATTTTGGAGGTGCT |
| SEQ ID | GI 1015637181 AH000040 Homo sapiens | CGTATACCTGCTCAC |
| NO: 3602 | hematopoietic stem cell antigen | TCCTGACGCTTCACT |
| | (CD34) gene, complete cds | CACACACAGCACAGG |
| | | ATCTGGTGAGGCTAT |
| SEQ ID | GI 6537133 AF102137 Homo sapiens | TACAGCAGGAAACTG |
| NO: 3603 | PERI gene, complete cds | CACCAGCTAGACTCC |
| | | ATTCTGGGACCATCT |
| | | CCAGGAGTCCATGAG |
| SEQ ID | GI 189571639 NG_007991 Homo sapiens | GTGACACATATAGCC |
| NO: 3604 | acyl-CoA dehydrogenase, | ACGGCTTCCTTTGCC |
| | C-2 to C-3 short chain | TGGCCTGAATTACAA |
| | (ACADS), RefSeqGene on chromosome 12 | GGGGAACGCTACTGA |
| SEQ ID | GI 209447054 NG_008716 Homo sapiens | GATGTGGTGACAGGT |
| NO: 3605 | aminolevulinate dehydratase | GCTCTGAAGGAGGTC |
| | (ALAD), RefSeqGene on chromosome 9 | ACCAGGACCTGACCT |
| | | CTTTGAAGGATCAGA |
| SEQ ID | GI 190341054 NG_008010 Homo sapiens | CTTCCAGCCACTGCA |
| NO: 3606 | aldolase, fructose-bisphosphate A | GGCTCTGCCCCTTCA |
| | (ALDOA), RefSeqGene on chromosome 16 | CCTAACAGCATAAGA |
| | | TAGGGCTAACAGTTG |
| SEQ ID | GI 301500676 NG_023437 Homo sapiens | ACATTGAATTTTCAA |
| NO: 3607 | apolipoprotein L4 | CCTGGCTATCCTGGA |
| | (APOL4), RefSeqGene on chromosome 22 | GATGTCCCCAGTCCA |
| | | TACACCCGATGGGGC |
| SEQ ID | GI 237858770 NG_012124 Homo sapiens | TCTTTTTAAGCTGGG |
| NO: 3608 | selectin E | ACACCCATCTTCTCC |
| | (SELE), RefSeqGene on chromosome 1 | TGCCTTCCAACACTG |
| | | GCACTCTTGGTTCCA |
| SEQ ID | GI 229577384 NG_011990 Homo sapiens | ATGCCCTCAAGGTTC |
| NO: 3609 | SMAD family member 3 | CTCAAGGGTCAGCTG |
| | (SMAD3), RefSeqGene on chromosome 15 | TCACAGTTCTCCAAA |
| | | GTGAGTTTTCAGGCA |
| SEQ ID | GI 190194362 NM_006426 Homo sapiens | CCTCTGGGAAGATGG |
| NO: 3610 | dihydropyrimidinase like 4 | ACGAGAATGAGTTCG |
| | (DPYSL4), mRNA | TCGCGGTGACCAGTA |
| | | CAAATGCTGCCAAAA |
| SEQ ID | GI 48526521AY644470 Homo sapiens | ACTCATCTGAAGGCT |
| NO: 3611 | interferon gamma receptor 2 | TAAACTACACTGGCA |
| | (interferon gamma transducer l) | GTCAGGACTCCGCTG |
| | (IFNGR2) gene, complete cds | TCTAACCACACGGGT |
| SEQ ID | GI 6537133 AF102137 Homo sapiens | GGTGCCCAAGCTAGA |
| NO: 3612 | PERI gene, complete cds | GGAGGGCAGAGAAGA |
| | | ATGCCTTGCTTGCTC |
| | | TCAGTCATGTTACTG |
| SEQ ID | GI 336176054 NG_029124 Homo sapiens | ACAAAAGTCGGCAGA |
| NO: 3613 | caspase 1 | GGTGCCATGCTCAGA |
| | (CASP1), RefSeqGene on chromosome 11 | ACCCAAGGATAGAGT |
| | | GGGGTGAAAGAAACA |
| SEQ ID | GI 209447084 NG_008733 Homo sapiens | GGCCCTCACCAATAC |
| NO: 3614 | copper chaperone for superoxide dismutase | TCTGTGAGGCACATA |
| | (CCS), RefSeqGene on chromosome 11 | CACACAGGCACAACC |
| | | TCCAGATGAGGAAAC |
| SEQ ID | GI 238018083 NG_012204 Homo sapiens | CCTGGGCCTCTCTGT |
| NO: 3615 | peroxisome proliferator | GTTTGGTTCCAAGCA |
| | activated receptor alpha | CTTCCCACCTCAAAC |
| | (PPARA), RefSeqGene on chromosome 22 | TCCCATTTTCAAACC |
| SEQ ID | GI 42794766 NM_203351 Homo sapiens | CAAGTTCGAGCACAA |
| NO: 3616 | mitogen-activated protein kinase kinase kinase 3 | CGGGGAGAGGCGAAT |
| | (MAP3K3), transcript variant 1, mRNA | TATAGCGTTCAGCCG |
| | | GCCTGTGAAATATGA |
| SEQ ID | GI 37595566 NM_007144 Homo sapiens | GTGCCTGCATTCCTT |
| NO: 3617 | polycomb group ring finger 2 | CTGCAAAACCTGCAT |
| | (PCGF2), mRNA | CGTGCGCTACCTGGA |
| | | GACCAACAAATACTG |
| SEQ ID | GI 166706752 EU332835 Homo sapiens | GGGATGCCTGTAGTT |
| NO: 3618 | v-akt murine thymoma viral oncogene homolog l | GGTGATGTGGGAACT |
| | (AKT1) gene, complete cds | GGGTTTTGAGGGATG |
| | | CCTAGGAGTTCATCC |
| SEQ ID | GI 29825390 AY242132 Homo sapiens | CCCAATGACTACCTG |
| NO: 3619 | cannabinoid receptor 2 | CTGAGCTGGCTCCTG |
| | (CNR2) gene, complete cds | TTCATCGCCTTCCTC |
| | | TTTTCCGGAATCATC |
| SEQ ID | GI 290543602 GU130197 Homo sapiens | GATGTTCTCTTGAGG |
| NO: 3620 | isolate MIA060410 Duffy | TGTGGGGTCACGGCC |
| | antigen/chemokine receptor | ATCTCAAGGGAGAAG |
| | (DARC) gene, complete cds | AGAAGAGGAACCAGA |
| SEQ ID | GI 62632868 AY995114 Homo sapiens | GGGGATTACCCACCC |
| NO: 3621 | tumor necrosis factor receptor | ACTATAATGGAGCGG |
| | 1-associated death domain protein | GTAGTCAAGACCGAG |
| | (TRADD) gene, complete cds [symbol] | GAGTGTCTGTTGGAC |
| SEQ ID | GI 336176054 NG_029124 Homo sapiens | CCCTGAAGAAACTCT |
| NO: 3622 | caspase 1 | AGGATGCATGGTGTG |
| | (CASP1), RefSeqGene on chromosome 11 | CACAGTGAAGTCCTG |
| | | GCATGGTGCAGAGAA |
| SEQ ID | GI 761631399 NG_042041 Homo sapiens | ATACAGGCAGCTCAT |
| NO: 3623 | integrin subunit beta 6 | TCTATTCTCAGCCAC |
| | (ITGB6), RefSeqGene on chromosome 2 | AGCCTCAGAAAGGAG |
| | | GGACCCAGACCAGAA |
| SEQ ID | GI 206725550 NM_004958 Homo sapiens | GTTGATCCTTAACGA |
| NO: 3624 | mechanistic target of rapamycin | GCTGGTCCGAATCAG |
| | (MTOR), mRNA | CAGCATGGAGGGAGA |
| | | GCGTCTGAGAGAAGA |
| SEQ ID | GI 54781368 AY791292 Homo sapiens | GCCCCTGGTCTATAC |
| NO: 3625 | cyclin GI | CTGGTACTTGGAGGT |
| | (CCNG1) gene, complete cds | AGGATTCAAAGCCAG |
| | | GCAGTTCTGACTCCA |
| SEQ ID | GI 306816 M96233 Human glutathione | CCCAGGGCACTTTGG |
| NO: 3626 | transferase class mu number 4 | AAGAGGCAGAGAACT |
| | (GSTM4) gene, complete cds | TTAGGAGCATGGATG |
| | | CAGCTGGCAATAGTA |
| SEQ ID | GI 197100280 NG_008374 Homo sapiens | GAGTCAGACAGGTGA |
| NO: 3627 | cytochrome P450 family 11 | AAATGGAGAATTGCC |
| | subfamily B member 2 | ACTCACCAAGGGCAG |
| | (CYP11B2), RefSeqGene on chromosome [symbol] | GCTTCTTGAGGGCTA |
| SEQ ID | GI 209447063 NG_008722 Homo sapiens | CCCATTAGGGGTGCT |
| NO: 3628 | lysyl oxidase | GCTTTGGTCTGCCAT |
| | (LOX), RefSeqGene on chromosome 5 | TCTGACACTATGTCT |
| | | GGCATAGCAGAGGTC |
| SEQ ID | GI 341572553 NG_029518 Homo sapiens | GTGCCTATGTGATTG |
| NO: 3629 | sestrin 1 | GAAATCCATTACCCA |
| | (SESN1), RefSeqGene on chromosome 6 | GTGGAGCAACGCACA |
| | | CAACTGGTGCATGCA |
| SEQ ID | GI 124001557 NM_152586 Homo sapiens | TGGGCTGGTATGGGA |
| NO: 3630 | ubiquitin specific peptidase 54 | CTCAGACCACTCAGA |
| | (USP54), transcript variant 1, mRNA | CTTAGCAGAAGATGT |
| | | TATCCACAGCCTGGG |
| SEQ ID | GI 24371240 NM_024630 Homo sapiens | GGTCTCGTGTTGAGA |
| NO: 3631 | zinc finger DHHC-type containing 14 | TATTGTGTGCCACAA |
| | (ZDHHC14), transcript variant 1, mRNA | CCCCCACAGTCTTCA |
| | | CCTCCGTGTGTGATG |
| SEQ ID | GI 18653445 AF479264 Homo sapiens | TGTGTGCAGTAGCAG |
| NO: 3632 | ligase IV, DNA, ATP-dependent | AGAAGCCCCCTCCTG |
| | (LIG4) gene, complete cds | GTGAGAAGCCATCTG |
| | | TGTTTCATACTCTCT |
| SEQ ID | GI 239787264 NG_012303 Homo sapiens | GCGCGTCTTTCTCAT |
| NO: 3633 | colony stimulating factor 1 receptor | AGTGATGTTAGCAGC |
| | (CSF1R), RefSeqGene on chromosome 5 | ATCCGCAGGCAAGGA |
| | | GAAACATGCAATGCC |
| SEQ ID | GI 197313719 NG_008421 Homo sapiens | TAGTTCAATCCCCAA |
| NO: 3634 | cytochrome P450 family 3 subfamily A member 4 | GCCCCTCCAAAGTGT |
| | (CYP3A4), RefSeqGene on chromosome 7 | CTTCTCCTCCTAGTC |
| | | CAGGGCCCATTTACT |
| SEQ ID | GI 63054827 NM_001915 Homo sapiens | AAGTCAGGATGGAGT |
| NO: 3635 | cytochrome b561 | CAGAACAACTACAGT |
| | (CYB561), transcript variant 1, mRNA | CATCCCCCGTGGTGT |
| | | CTGCACATCACTCCA |
| SEQ ID | GI 13430063 AF253322 Homo sapiens | TGTCAGGGAAAGGGG |
| NO: 3636 | cytochrome P450 | AAACCTTTCCACCAG |
| | (CYP1A1) and cytochrome P450 | AACTGCTTACTGGGC |
| | (CYP1A2) genes, complete cds | ATGAAGAAGAGGGTG |
| SEQ ID | GI 20336662 AF503510 Homo sapiens | ACGAGGGTTTCTGTG |
| NO: 3637 | coagulation factor X | GTGGAACTATTCTGA |
| | (F10) gene, complete cds | GCGAGTTCTACATCC |
| | | TAACGGCAGCCCACT |
| SEQ ID | GI 224809232 NG_011437 Homo sapiens | GGGATAACAGAGAAA |
| NO: 3638 | arachidonate 5-lipoxygenase | TGCTGCAGGCATTGG |
| | (ALOX5), RefSeqGene on chromosome 10 | CCCCAAATCTCAGGC |
| | | CTCCTATTCCCAGTA |
| SEQ ID | GI 352962130 NG_030351 Homo sapiens | GGGGGAAGAGAGGAA |
| NO: 3639 | eukaryotic translation initiation | GTGGGGATCCAGTTA |
| | factor 2 alpha kinase 2 | ACGAGGTACTGCTAT |
| | (EIF2AK2), RefSeqGene on chromoso [symbol] | GGCCTAATGGAAGCA |
| SEQ ID | GI 167614484 NM_006111 Homo sapiens | CTTGTCTGAATTTGC |
| NO: 3640 | acetyl-CoA acyltransferase 2 | TGCCAAGGCTGCCTT |
| | (ACAA2), mRNA | GTCTGCTGGCAAAGT |
| | | CTCACCTGAAACAGT |
| SEQ ID | GI 116734711 NM_000020 Homo sapiens | CTTGGGCTTTCTGTC |
| NO: 3641 | activin A receptor like type 1 | TCCTCAACAAGAGTG |
| | (ACVRL1), transcript variant 1, mRNA | CAGCTTGCTGAATGT |
| | | CAGCTGCCTGAGAGA |
| SEQ ID | GI 41872630 NM_004104 Homo sapiens | GAGCACAGACGAGAG |
| NO: 3642 | fatty acid synthase | CACCTTTGATGACAT |
| | (FASN), mRNA | CGTCCATTCGTTTGT |
| | | GAGCCTGACTGCCAT |
| SEQ ID | GI 49574531 NM_019884 Homo sapiens | GCCTCACCCCTGTGG |
| NO: 3643 | glycogen synthase kinase 3 alpha | TGGGCTTTTTAAGAG |
| | (GSK3A), mRNA | GATTTTAACTGGTTG |
| | | TGGGGAGGGAAGAGA |
| SEQ ID | GI 386781923 NM_002371 Homo sapiens | TACCTGTTGGTATTG |
| NO: 3644 | mal, T-cell differentiation protein | TCCACAAGCTCTCCC |
| | (MAL), transcript variant a, mRNA | GAGCGCCCCATCTTG |
| | | TGCCATGTTTTAAGT |
| SEQ ID | GI 218083972 NM_134431 Homo sapiens | TCGGTGCATGGTGGT |
| NO: 3645 | solute carrier organic anion | TTGGCTTTCTGATTT |
| | transporter family member 1A2 | GTGCAGGAGTTAACG |
| | (SLCO1A2), transcript variant 1, [symbol] | TGCTCACTGCCATTC |
| SEQ ID | GI 1015809708 NM_003807 Homo sapiens | CCAGCAATTTCCATC |
| NO: 3646 | TNF superfamily member 14 | ACCTCTCAATGCTTC |
| | (TNFSF14), transcript variant 1, mRNA | AGTTTCCCCATCGGC |
| | | AAGATGGTTGTGGGG |
| SEQ ID | GI 29501801 AY260471 Homo sapiens | ACATGTGGTCTCGGC |
| NO: 3647 | BCL2-antagonist/killer 1 | CCCCTATTTTTCTCT |
| | (BAK1) gene, complete cds | TTCGGGGTCCCAGAC |
| | | TTGTATTTTGGGCAT |
| SEQ ID | GI 299782537 NG_023178 Homo sapiens | CGGAGGCTTTCACTG |
| NO: 3648 | CD14 molecule | TGTCACTCCCCGACA |
| | (CD14), RefSeqGene on chromosome 5 | TAATGGGAAATTTGG |
| | | GCCTAGGGAACTGAC |
| SEQ ID | GI 236459493 NG_012010 Homo sapiens | GATTGGCCCATCTCA |
| NO: 3649 | lymphotoxin alpha | AGGAGCATCCTTCGC |
| | (LTA), RefSeqGene on chromosome 6 | ATATCTCACATGCAC |
| | | GTGACACTGAGCCTC |
| SEQ ID | GI 2828023 AF036905 Homo sapiens | GCCTGACAACAGCCT |
| NO: 3650 | linker for activation of T cells | GAGAAATCCCCCCGT |
| | (LAT) mRNA, complete cds | AACTTATTATCACTT |
| | | TGGGGTTCGGCCTGT |
| SEQ ID | GI 1049011196 AH002836 Homo sapiens | GCTGTGGTCCCACTC |
| NO: 3651 | 1g J-chain gene, complete cds | GTATATGGTGGTGAG |
| | ; and IGJ gene, complete sequence | ACCAAAATGGTGGAA |
| | | ACAGCCTTAACCCCA |
| SEQ ID | GI 1036031265 AH007464 Homo sapiens | AAGCTGGAGGTGCCA |
| NO: 3652 | methylenetetrahydrofolate reductase | CAGGAGATCAAGGAC |
| | (MTHFR) gene, complete cds | GTGATTGAGCCAATC |
| | | AAAGACAACGATGCT |
| SEQ ID | GI 32263624 AY325800 Homo sapiens | CTCCTTAAGGGTGCT |
| NO: 3653 | stannin | GTTCCTCAAGGACGC |
| | (SNN) gene, complete cds | AGCAGGTTCGACCCT |
| | | ATTTGGAGGGAAAAC |
| SEQ ID | GI 297747369 NG_021416 Homo sapiens | TCCTTAGCCCTATGA |
| NO: 3654 | growth hormone releasing hormone receptor | CTCCCTGAGCCACTC |
| | (GHRHR), RefSeqGene on chromosome 7 | TCCAGTTTGGTGGTT |
| | | TCCTTTGAAGAGGGT |
| SEQ ID | GI 767172199 NG_042051 Homo sapiens | GTGCTGCAAGGAGCT |
| NO: 3655 | kelch like family member 41 | AAGGCCTTCAGTGTC |
| | (KLHL41), RefSeqGene on chromosome 2 | CCCTTCCTTACCCAG |
| | | GTTTCTCACAGAATG |
| SEQ ID | GI 1063759771 NG_051548 Homo sapiens | AGGCCTGGAGTGGAT |
| NO: 3656 | mitogen-activated protein | TTCCCTCTGTACCCC |
| | kinase-activated protein kinase 3 | TTTATGGGTGAGCAT |
| | (MAPKAPK3), RefSeqGene on [symbol] | GGCTAAGGCTACTAG |
| SEQ ID | GI 618857519 NG_034119 Homo sapiens | CCTGGAGGTTTCTGG |
| NO: 3657 | nuclear receptor subfamily | TTGGGGTGGTTTGGG |
| | 2 group F member 1 | TTTGAGAGGGGACTC |
| | (NR2F1), RefSeqGene on chromosome 5 | CAGGAATCCTTTAAG |
| SEQ ID | GI 194394200 NG_008275 Homo sapiens | CAGGGTTTGAGAGAT |
| NO: 3658 | prokineticin 2 | TGTATCTCCAAGGGT |
| | (PROK2), RefSeqGene on chromosome 3 | TGCAGACCCACCTGT |
| | | CTACAGGGGTCAGGA |
| SEQ ID | GI 493799665 NM_002994 Homo sapiens | CGACATCCTCGAGGC |
| NO: 3659 | C-X-C motif chemokine ligand 5 | CCTAGCATTTCTCCT |
| | (CXCL5), mRNA | TGGATAGGGGACCAG |
| | | AGAGAGCTTGGAATG |
| SEQ ID | GI 187408 M13577 Human myelin basic protein | GGCTCACAAGGGATT |
| NO: 3660 | (MBP) mRNA, complete cds | CAAGGGAGTCGATGC |
| | | CCAGGGCACGCTTTC |
| | | CAAAATTTTTAAGCT |
| SEQ ID | GI 42519913 NM_012448 Homo sapiens | AAAGGCAGTGAGTTT |
| NO: 3661 | signal transducer and | CGTGAAGCCTGGAAG |
| | activator of transcription 5B | TTGGCCATGTGTCTT |
| | (STAT5B), mRNA | AAGAGTGGCTGGACT |
| SEQ ID | GI 24756896 L47234 Homo sapiens | AGAATTCCCGTCTCA |
| NO: 3662 | ERCC2 | GTGGTCAAATTCTCA |
| | (ERCC2) and kinesin light chain | TTCATCGTGGCCCAG |
| | (KLC2) genes, complete cds, | GCAAGCACACTTCCT |
| | complete sequence | |
| SEQ ID | GI 32165625 AY323826 Homo sapiens | AAGCAGGGTCAGGTG |
| NO: 3663 | interleukin 10 receptor, beta | CCTCCTGAGGCAAGT |
| | (IL10RB) gene, complete cds | GTGAATGCAAACTCC |
| | | ACTTACTGTTTAGCT |
| SEQ ID | GI 507834151 NG_008376 Homo sapiens | AGAGCCTGTGACTAT |
| NO: 3664 | cytochrome P450 family 2 subfamily D member 6 | GGAGAGAGGCCACCT |
| | (CYP2D6), RefSeqGene on chromosome 2 [symbol] | GAGGTAGTACCCTCT |
| | | GAGGAACAGGAACAA |
| SEQ ID | GI 1176461486 NG_030337 Homo sapiens | GGAAGAGGACCAAGA |
| NO: 3665 | NLR family CARD domain containing 5 | GGATGGGTTTACTGT |
| | (NLRC5), RefSeqGene on chromosome 16 | GGTGCTGGGGAGGGG |
| | | ATAGTAGCAGAGAAC |
| SEQ ID | GI 292658763 NM_014143 Homo sapiens | AAGACGGGTTGAGAA |
| NO: 3666 | CD274 molecule | TCCCTAATTTGAGGG |
| | (CD274), transcript variant 1, mRNA | TCAGTTCCTGCAGAA |
| | | GTGCCCTTTGCCTCC |
| SEQ ID | GI 664806095 NM_005438 Homo sapiens | CGCAGTGGTTCAGCC |
| NO: 3667 | FOS like 1, AP-1 transcription factor subunit | CGAGAACTTTTCATT |
| | (FOSLl), transcript variant 1, mRNA | CATAAAAAGAAAAGA |
| | | CTCCGCACGGCGCGG |
| SEQ ID | GI 1072314151 NM_000413 Homo sapiens | CTGTGGGTGGCTAAT |
| NO: 3668 | hydroxysteroid 17-beta dehydrogenase 1 | TAAGATAGATCGCGT |
| | (HSD17B1), transcript variant 1, mRNA | TAGCCAGTTTTACCA |
| | | GCGCAGCTAGGCGCG |
| SEQ ID | GI 325495520 HQ692855 Homo sapiens | CAAGGGCTTCTTCAA |
| NO: 3669 | nerve growth factor IB | GCGCACAGTGCAGAA |
| | nuclear receptor variant 1 | AAACGCCAAGTACAT |
| | (NR4A1) mRNA, complete cds | CTGCCTGGCTAACAA |
| SEQ ID | GI 78482607 NM_021129 Homo sapiens | CCACCACCCTGTGAA |
| NO: 3670 | pyrophosphatase | TCTGCCTGCACAGTA |
| | (inorganic) 1 | CCAACAGACGTGGAT |
| | (PPA1), mRNA | AAGTGGTTCCATCAC |
| SEQ ID | GI 21655314 AY124010 Homo sapiens | ACACATGTGAAGGGT |
| NO: 3671 | interleukin 1 receptor, type II | GGCGTTTCAGATCAT |
| | (IL1R2) gene, complete cds | TTCCAGATGAGCAGG |
| | | CTGGGAGAGATGGTG |
| SEQ ID | GI 117606491 EF064720 Homo sapiens | GGTGAGACGCGTTAG |
| NO: 3672 | interleukin 27 | CAGGTGACATCATGG |
| | (IL27) gene, complete cds | AAGATCAAGCAGGGA |
| | | ATGTCCGGGGAAATC |
| SEQ ID | GI 228008299 NG_011964 Homo sapiens | TCTTCTGGAGGAGAC |
| NO: 3673 | arginase 2 | CTCTATAACAATCAG |
| | (ARG2), RefSeqGene on chromosome 14 | CTGAGGCTGCTGAAT |
| | | GAGGGGGAAGGGCAC |
| SEQ ID | GI 221139857 NG_009364 Homo sapiens | CACACATATTTGGGG |
| NO: 3674 | cyclin dependent kinase inhibitor 1A | GGCATTCACACCCAT |
| | (CDKN1A), RefSeqGene on chromosome 6 | GAGGGACACCTCTGG |
| | | GGGGAAAACAAATTG |
| SEQ ID | GI 1033837679 NG_008338 Homo sapiens | GTTGGTTGACTGGCA |
| NO: 3675 | cytochrome P450family 7 subfamily B member 1 | AAACCAGAAGGGCTT |
| | (CYP7B1), RefSeqGene on chromosome 8 [symbol] | CCTCTTGTTTGGCCA |
| | | ATGCTTGAGCTCTCA |
| SEQ ID | GI 953768433 NG_016863 Homo sapiens | GACCACTATTAAACA |
| NO: 3676 | delta like non-canonical Notch ligand 1 | GCCTGGTACAGACGC |
| | (DLK1), RefSeqGene on chromosome 14 | TGGCTTGTGCCACCG |
| | | TAGACAGACCTCGTA |
| SEQ ID | GI 520260356 NM_021913 Homo sapiens | CTGCAGCTTTCCGAC |
| NO: 3677 | AXL receptor tyrosine kinase | ACGGGACAGTACCAG |
| | (AXL), transcript variant 1, mRNA | TGTTTGGTGTTTCTG |
| | | GGACATCAGACCTTC |
| SEQ ID | GI 62530382 NM_004281 Homo sapiens | AACAGAAAGCCATTG |
| NO: 3678 | BCL2 associated athanogene 3 | ATGTCCCAGGTCAAG |
| | (BAG3), mRNA | TCCAGGTCTATGAAC |
| | | TCCAGCCCAGCAACC |
| SEQ ID | GI 347446697 NG_030008 Homo sapiens | ACCAACTATCTTGGT |
| NO: 3679 | colony stimulating factor 1 | AACTGCCTAACTGAC |
| | (CSF1), RefSeqGene on chromosome 1 | CAGCTGTTGCTTGGG |
| | | GAGCCCATTGAGCAA |
| SEQ ID | GI 349732110 NG_030313 Homo sapiens | TGTCTGGCAGGAAAG |
| NO: 3680 | dihydrolipoamide S-succinyltransferase | ATAGAGTGGGCTGGA |
| | (DLST), RefSeqGene on chromosome 14 | CGGTACAGGATCGCG |
| | | TAAAGTGTGGACTTT |
| SEQ ID | GI 345478700 NG_029900 Homo sapiens | CTGCCTCTCCCTTTG |
| NO: 3681 | p21 | TTCTCTGTGCCTCTA |
| | (RAC1) activated kinase 1 | GCCTCCTATCTGCTG |
| | (PAK1), RefSeqGene on chromosome 11 | GAGGTTTGTGCTACA |
| SEQ ID | GI 340523103 NG_029468 Homo sapiens | GATTAGCTCTGTGCT |
| NO: 3682 | SWI/SNF related, matrix associated, actin | GCAGCCAATCCATGT |
| | dependent regulator of chromatin, | TAGCCCCCCCAAGTT |
| | subfamily d, m [symbol] | AGGAAGACCTGGAAA |
| SEQ ID | GI 584458494 NG_033933 Homo sapiens | CAAATGCATCACTAA |
| NO: 3683 | toll like receptor 9 | AACCAAGGCCTTCCA |
| | (TLR9), RefSeqGene on chromosome 3 | GGGCCTAACACAGCT |
| | | GCGCAAGCTTAACCT |
| SEQ ID | GI 197276631 NM_003670 Homo sapiens | ATTGCCCTGCAGAGT |
| NO: 3684 | basic helix-loop-helix family member e40 | GGTTTACAAGCTGGT |
| | (BHLHE40), mRNA | GAGCTGTCAGGGAGA |
| | | AATGTCGAAACAGGT |
| SEQ ID | GI 22165426 NM_002991 Homo sapiens | GCCTGATGACCATAG |
| NO: 3685 | C-C motif chemokine ligand 24 | TAACCAGCCTTCTGT |
| | (CCL24), mRNA | TCCTTGGTGTCTGTG |
| | | CCCACCACATCATCC |
| SEQ ID | GI 345199309 NM_002167 Homo sapiens | CGAGCTCACTCCGGA |
| NO: 3686 | inhibitor of DNA binding 3, HLH protein | ACTTGTCATCTCCAA |
| | (ID3), mRNA | CGACAAAAGGAGCTT |
| | | TTGCCACTGACTCGG |
| SEQ ID | GI 14488407 AF386492 Homo sapiens | CCAACTCTGTTCATG |
| NO: 3687 | serine-cysteine proteinase | ACACTTCCTTCCAGC |
| | inhibitor clade E member 1 | ACCAAATGCTTCCCA |
| | (SERPINE1) gene, complete cds | CCCCTCTACTCCCAC |
| SEQ ID | GI 30526191 AY275469 Homo sapiens | CTTTAACCCGGTGCT |
| NO: 3688 | chemokine C motif receptor 1 | CTATGTCTTCGTGGG |
| | (XCR1) gene, complete cds | GGTCAAGTTCCGCAC |
| | | ACACCTGAAACATGT |
| SEQ ID | GI 209447058 NG_008718 Homo sapiens | TTTGTTGTCCCACTC |
| NO: 3689 | apurinic/apyrimidinic | TCTGTTACCTGCATT |
| | endodeoxyribonuclease 1 | GTGTGACAGCAAGAT |
| | (APEX1), RefSeqGene on chromosome 14 | CCGTTCCAAGGCCCT |
| SEQ ID | GI 341865611 NG_029556 Homo sapiens | GTACTTACGTGCCAT |
| NO: 3690 | growth factor receptor bound protein 2 | TCCCTTTCCCTGAAA |
| | (GRB2), RefSeqGene on chromosome 17 | TGCCCTTACTCTGGC |
| | | TTCTCTGCCTGGCAA |
| SEQ ID | GI 527498317 NG_008179 Homo sapiens | GCAGAGACTCACATG |
| NO: 3691 | general transcription factor IIi | GAGCCAGCTGCTATG |
| | (GTF2I), RefSeqGene on chromosome 7 | CAGAGCTCAAACTTC |
| | | AGCAGAAACCCAGAG |
| SEQ ID | GI 167614499 NM_002286 Homo sapiens | TCTCCTGGTCTCCCT |
| NO: 3692 | lymphocyte activating 3 | TCTTCTAGAACCCCT |
| | (LAG3), mRNA | TCCTCCACCTCCCTC |
| | | TCTGCAGAACTTCTC |
| SEQ ID | GI 7637751 AF250378 Homo sapiens | CCCTGTGGAGGTCAG |
| NO: 3693 | E2F transcription factor 4 | CTATACCAAAAGGGT |
| | (E2F4) gene, complete cds | ACAGAAATTCTGGAG |
| | | TGGGTCCCTGGGTCT |
| SEQ ID | GI 117606677 EF078888 Homo sapiens | TTGGGGAGGGAGTGT |
| NO: 3694 | Kruppel-like factor 2 | TCGCTGGGAAACCTT |
| | (lung) | GAGAGATTCCGTGTC |
| | (KLF2) gene, complete cds | TTAGAATGCTGGAGA |
| SEQ ID | GI 60391402 AB019488 Homo sapiens | TGAGCAGGGATATCT |
| NO: 3695 | NTRK1 gene for TRKA, complete cds | ACAGCACCGACTATT |
| | | ACCGTGTAAGGGTCC |
| | | TTTGTCCCCAACGCC |
| SEQ ID | GI 205361192 NG_008140 Homo sapiens | TATCGGGGGCCACCT |
| NO: 3696 | aminoadipate-semialdehyde synthase | TTTCATACAGGCAGG |
| | (AASS), RefSeqGene on chromosome 7 | TGTCACAGAACTGAC |
| | | TGTGGGACTTGAGTA |
| SEQ ID | GI 223671920 NG_009776 Homo sapiens | AGGACTTACACCAGA |
| NO: 3697 | epoxide hydrolase 1 | GGATCGATAAGTTCC |
| | (EPHX1), RefSeqGene on chromosome 1 | GTTTCACCCCACCTT |
| | | TGGAGGACAGCTGCT |
| SEQ ID | GI 742670592 NG_013347 Homo sapiens | GTGAAGGAATCAGCA |
| NO: 3698 | glutamate-ammonia ligase | TGGGAGATCATCTCT |
| | (GLUL), RefSeqGene on chromosome 1 | GGGTGGCCCGTTTCA |
| | | TCTTGCATCGTGTGT |
| SEQ ID | GI 224809262 NG_011468 Homo sapiens | CACTCCACCCCCGTG |
| NO: 3699 | matrix metallopeptidase 9 | TTCTCATCTCTTCCC |
| | (MMP9), RefSeqGene on chromosome 20 | ACTCCTCCTGTTATT |
| | | TACTCTGCTCCACCC |
| SEQ ID | GI 49574517 NM_003695 Homo sapiens | GGAGGACAGAAGCCC |
| NO: 3700 | lymphocyte antigen 6 family member D | TGTGGATCCCCGGAT |
| | (LY6D), mRNA | TTCACACTCCTTCTG |
| | | TTTTGTTGCCGTTTA |
| SEQ ID | GI 260593637 NG_013005 Homo sapiens | GCTGAACAGCAATCA |
| NO: 3701 | calcitonin receptor | TGGAAACTGATGTGT |
| | (CALCR), RefSeqGene on chromosome 7 | TGTGTCTTAGGGACT |
| | | GAGGGGAGGGGGTGG |
| SEQ ID | GI 429535868 NG_033017 Homo sapiens | TAGCAGGTATCAAGA |
| NO: 3702 | membrane bound transcription factor peptidase, site 1 | CTCATTCCTGCTTGT |
| | (MBTPS1), RefSeqGene on chromoso [symbol] | GGCTGAGCAGTGTCC |
| | | TGTGGTGTGGCTAGA |
| SEQ ID | GI 520260356 NM_021913 Homo sapiens | TGAGTGAAGCGGTCT |
| NO: 3703 | AXL receptor tyrosine kinase | GCATGAAGGAATTTG |
| | (AXL), transcript variant 1, mRNA | ACCATCCCAACGTCA |
| | | TGAGGCTCATCGGTG |
| SEQ ID | GI 806607 M90696 Homo sapiens | CCCGTTACTTGGGAG |
| NO: 3704 | cathepsin S | GCCAAGGCAGGCATT |
| | (CTSS) mRNA, complete cds | ATCAATCTTGAGGCC |
| | | AGGAGTTAAAGAGCA |
| SEQ ID | GI 966751447 NM_002581 Homo sapiens | CAACCAGGAGGAGTT |
| NO: 3705 | pappalysin 1 | GGGCTGTATTTTTCA |
| | (PAPPA), mRNA | AAGGTGGGGAGAGTG |
| | | GAGCACACACCTTGA |
| SEQ ID | ref \| NG_029387.2\| Homo sapiens | CACATGCATGATTGT |
| NO: 3706 | V-set pre-B cell surrogate light chain 1 | AGGTGGAACCAGAAG |
| | (VPREB1), | AACCACCCAGGCAAC |
| | | TCACAGAACTGGGGA |
| SEQ ID | GI 300796044 NG_023367 Homo sapiens | GGCCCTCCATCTCCT |
| NO: 3707 | platelet derived growth factor receptor beta | ACTATGTACAATGAG |
| | (PDGFRB), RefSeqGene on chromosome 5 | AGCAAGACCATCCCC |
| | | CAGGAACTGCCTAGC |
| SEQ ID | GI 188497624 NM_012205 Homo sapiens | TCATGTTCATCGGAG |
| NO: 3708 | 3-hydroxyanthranilate 3,4-dioxygenase | GCCCCAACACCAGGA |
| | (HAAQ), mRNA | AGGACTATCACATCG |
| | | AAGAGGGTGAAGAGG |
| SEQ ID | GI 544583587 NM_004683 Homo sapiens | AGAACTGCCGGTGTG |
| NO: 3709 | regucalcin | GTGAGTCTCCAGTAT |
| | (RGN), transcript variant 1, mRNA | GGGAGGAAGTGTCCA |
| | | ACTCTCTGCTCTTTG |
| SEQ ID | GI 227496937 NG_011931 Homo sapiens | CCAGAGTTTTTGTTT |
| NO: 3710 | cholinergic receptor nicotinic alpha 4 subunit | CCTTTGAAGCAGCAA |
| | (CHRNA4), RefSeqGene on chromosome 20 | TTTCAGGAGCAGCAG |
| | | AGGCAAGGGCCAGGA |
| SEQ ID | GI 537544658 NG_033791 Homo sapiens | GTTAGGGGTTAAAAT |
| NO: 3711 | gremlin 1, DAN family BMP antagonist | CCCCCTCTTAAACGG |
| | (GREM1), RefSeqGene on chromosome 15 | TCCGAGGGCAGAGAG |
| | | GTGACCACCGATAGG |
| SEQ ID | GI 197209823 NG_008387 Homo sapiens | GTCCCCAGCCATTGC |
| NO: 3712 | interleukin 1 receptor associated kinase 1 | TTAAGAAGTGCAGGT |
| | (IRAK1), RefSeqGene on chromosome X | CACGGAGACTTTGCT |
| | | CCTCGTTTTCCAGAA |
| SEQ ID | GI 62122910 NM_001014336 Homo sapiens | AATCTCAGGGACCCC |
| NO: 3713 | interleukin 31 | TCATATGGGCTAGTC |
| | (IL31), mRNA | CCGGGAGGGCTGAGA |
| | | TGTGAATTTGTGAAT |
| SEQ ID | GI 1041818013 NM_006065 Homo sapiens | TGCTGCCACAGCCCA |
| NO: 3714 | signal regulatory protein beta 1 | ACATTGAGGAGCCCT |
| | (SIRPB1), transcript variant 1, mRNA | CGATGACTGCCCTTT |
| | | ACAACTCATATTCAG |
| SEQ ID | GI 117606537 EF064743 Homo sapiens | GATAATCAGGTCTCA |
| NO: 3715 | chemokine | CCAAACCTGGCAGCC |
| | (C-X-C motif) ligand 13 | TTCCACTGTACGTGT |
| | (B-cell chemoattractant) | GGGCAAAGACCAACA |
| | (CXCL13) gene, complete cds | |
| SEQ ID | GI 31164 X51956 Human ENO2 gene for neuron specific | GGGGATGAAGCTCGC |
| NO: 3716 | (gamma) enolase | TTTGCCGGACATAAC |
| | | TTCCGTAATCCCAGT |
| | | GTGCTGTGATTCCTC |
| SEQ ID | GI 238776812 NG_012249 Homo sapiens | AAGTTGATCAAAGAA |
| NO: 3717 | aldehyde dehydrogenase 1 family member A1 | GCTGCCGGGAAAAGC |
| | (ALDH1A1), RefSeqGene on chromosome 9 | AATCTGAAGAGGGTG |
| | | ACCCTGGAGCTTGGA |
| SEQ ID | GI 347446697 NG_030008 Homo sapiens | CTCCCAAAAACATCA |
| NO: 3718 | colony stimulating factor 1 | GGGCCCCCATCACTC |
| | (CSF1), RefSeqGene on chromosome 1 | CAGAAGAAAGCCAAG |
| | | GTTGTCTAGTCTGGG |
| SEQ ID | GI 699969198 NG_041780 Homo sapiens | GGAAAAGGCTGCAGA |
| NO: 3719 | NLR family CARD domain containing 4 | AGACACAGGTGGAAT |
| | (NLRC4), RefSeqGene on chromosome 2 | CCACATGGAAGAGGC |
| | | CCCAGAAACCTACAT |
| SEQ ID | GI 1150561157 NG_052945 Homo sapiens | GAGAGTTCTCAATGC |
| NO: 3720 | succinate-CoA ligase GDP-forming beta subunit | ATGGCAGCTGGCTTT |
| | (SUCLG2), RefSeqGene on chromosome 3 | CCCAGTGTGAGTGAC |
| | | CCAAGACCAAGGTAG |
| SEQ ID | GI 523498696 NM_002981 Homo sapiens | GCCCTACACCATTCC |
| NO: 3721 | C-C motif chemokine ligand 1 | TTCTGCCCTGCTTTT |
| | (CCL1), mRNA | GCTAGGTCACAGAGG |
| | | ATCTGCTTGGTCTTG |
| SEQ ID | GI 149192859 NM_012192 Homo sapiens | CACAATCCGTTGTTC |
| NO: 3722 | translocase of inner mitochondrial membrane 10B | TGTCGTTTAGTGCAT |
| | (TIMM10B), mRNA | ATCTGCTGGCTTCAG |
| | | CCCTGGCAGCTGAGA |
| SEQ ID | GI 219521814 NG_009215 Homo sapiens | AGGTCTAAAGTGGAG |
| NO: 3723 | bone morphogenetic protein 4 | AGCAATGCCATTTTA |
| | (BMP4), RefSeqGene on chromosome 14 | ATTCTCCCTCCCCCA |
| | | CCCCTTTTCACCCCC |
| SEQ ID | GI 334848115 NG_029039 Homo sapiens | AAGCTGTGGAAGTCA |
| NO: 3724 | major histocompatibility complex, class 1, G | GCGGTTGAACCTATT |
| | (HLA-G), RefSeqGene on chromosome 6 | TTTCCTAATGCTCCC |
| | | CTCAGCACTGCCCTC |
| SEQ ID | GI 1028224165 NG_047209 Homo sapiens | CCTTTGGCAAATGCC |
| NO: 3725 | interleukin 33 | ACCTGAGAAGCCATG |
| | (IL33), RefSeqGene on chromosome 9 | CCAGCCCTGGAAACA |
| | | CTTTGAATCAGATGA |
| SEQ ID | GI 237858699 NG_012094 Homo sapiens | CCAACAGACAACCCC |
| NO: 3726 | kallikrein 1 | AAAGTCTGGCACATC |
| | (KLK1), RefSeqGene on chromosome 19 | CTCAAAATCACCCCT |
| | | ACTCACCTCCCCAAA |
| SEQ ID | GI 346227162 NG_029971 Homo sapiens | AAACACTTTTCTAAT |
| NO: 3727 | RELA proto-oncogene, NF-kB subunit | CAGGGCCAGCCACTG |
| | (RELA), RefSeqGene on chromosome 11 | GAGAAACTGAAATGA |
| | | GTGGGCGGGGTGCTA |
| SEQ ID | GI 209447083 NG_008732 Homo sapiens | GACCTCACAGGAAGC |
| NO: 3728 | vascular endothelial growth factor A | AGTGGACTGGCCTGT |
| | (VEGFA), RefSeqGene on chromosome 6 | TTCCCCACTGTTCTT |
| | | TCTGTTTTCACACCT |
| SEQ ID | GI 164695701 AK315511 Homo sapiens | ACAAGAGCACCATCG |
| NO: 3729 | cDNA, FLI96576, Homo sapiens | GCAGGGACTTGATAG |
| | annexin A4 | ACGACCTGAAGTCAG |
| | (ANXA4), mRNA | AACTGAGTGGCAACT |
| SEQ ID | GI 747811824 NM_017594 Homo sapiens | CAACAGTAAGCCACC |
| NO: 3730 | DIRAS family GTPase 2 | CACTCTGGAGTCACA |
| | (DIRAS2), mRNA | GAATCTGCCAGGCGG |
| | | TTCAAGTGAAAACCA |
| SEQ ID | GI 58530885 NM_001570 Homo sapiens | TGCAGTTCTTGACTC |
| NO: 3731 | interleukin 1 receptor associated kinase 2 | ACCTCTCTGGGCCTC |
| | (IRAK2), mRNA | AGGTTCTACAAATGC |
| | | CAGACACCTAGCGAA |
| SEQ ID | GI 402794166 NM_002382 Homo sapiens | TAAAAAGGAAGTGGG |
| NO: 3732 | MYC associated factor X | GACAGATTCGCAGCA |
| | (MAX), transcript variant 1, mRNA | CAGAGTCGCTGGCAT |
| | | GTTTCACTCCTGCTT |
| SEQ ID | GI 1036032480 AH002739 Homo sapiens | ATGTCCCTGTTTCCT |
| NO: 3733 | cholecystokinin | TCCTCCCTGCTCCTT |
| | (CCK) gene, complete cds | GTAGCTCCTTCTGGA |
| | | CGAATGTCCATCGTT |
| SEQ ID | GI 238018114 NG_012216 Homo sapiens | AGGGAATGATCCCTT |
| NO: 3734 | B-cell CLL/lymphoma 10 | ATCTCTGGTTCCCTC |
| | (BCL10), RefSeqGene on chromosome 1 | ATCAGCCCCAGCAAT |
| | | GTCCTAGTCTTGGGG |
| SEQ ID | GI 189409117 NG_007972 Homo sapiens | AGAGCCCTAAAAAGC |
| NO: 3735 | cytochrome P450 family 2 subfamily C member 8 | TTCTCAGCAGAGCTT |
| | (CYP2C8), RefSeqGene on chromosome 10 [symbol] | AGCCTATCTGCATGG |
| | | CTGCCAAGTGTTGCA |
| SEQ ID | GI 628601932 NG_034128 Homo sapiens | CTCCCTTGGGTCGGA |
| NO: 3736 | guanylate cyclase 1 soluble subunit alpha | GTCATGAGCCTGTGA |
| | (GUCY1A3), RefSeqGene on chromosome 4 | TTGCCTACACCTGCG |
| | | TGTTATTAGGTCTCA |
| SEQ ID | GI 301336145 NG_023427 Homo sapiens | GCAGATTCCTGAGAT |
| NO: 3737 | myocyte enhancer factor 2C | TGCAGCTAAGTGGGC |
| | (MEF2C), RefSeqGene on chromosome 5 | CTGAGGTGGGGCCCA |
| | | TGAATCTGGATTTTA |
| SEQ ID | GI 385275063 NG_032144 Homo sapiens | ACCCCAAAAGGCTTT |
| NO: 3738 | transient receptor potential | CAGCCAAAACGTCTG |
| | cation channel subfamily V member 3 | AGCCTAGGTAGGTTT |
| | (TRPV3), RefSeqGene on [symbol] | ACCAAGGGAAGCCAT |
| SEQ ID | GI 95104789 NM_005860 Homo sapiens | GGCATTCTCTGCTGG |
| NO: 3739 | follistatin like 3 | TAATTCCTGAAGAGG |
| | (FSTL3), mRNA | CATGACTGCTTTTCT |
| | | CAGCCCCAAGCCTCT |
| SEQ ID | GI 436408720 NM_014226 Homo sapiens | GTCAACAACCTACGA |
| NO: 3740 | MOK protein kinase | GAGATCCAAGCACTG |
| | (MOK), transcript variant 1, mRNA | AGGCGCCTGAATCCG |
| | | CACCCAAACATTCTT |
| SEQ ID | GI 196259787 NM_001098531 Homo sapiens | AGAAGATCCTAGAGC |
| NO: 3741 | Rap guanine nucleotide exchange factor 3 | TTCTGTTGGAGGCCA |
| | (RAPGEF3), transcript variant 1, mRNA | TGGGACCAGATTCCA |
| | | GTGCTCATGACCCAA |
| SEQ ID | GI 10799005 AF261108 Homo sapiens | GGGAACTACGGCAAA |
| NO: 3742 | type XV collagen | CTGGACAGTACTGCC |
| | (COL15A1) gene, promoter | TTAGCTGAAGGCAGC |
| | sequence and exon 1, | AGCCCCTATTCAATG |
| SEQ ID | GI 21105788 AF512686 Homo sapiens | CCTCTGTATTACCGT |
| NO: 3743 | interleukin 12B | TCCTGTCCCTAACCC |
| | (natural killer cell stimulatory | AAGTCCTTCAGTTCT |
| | factor 2, cytotoxic lymphocyte | GGGTGCTCCAGCACA |
| | maturation factor | |
| SEQ ID | GI 8101110 AF268380 Homo sapiens | AGCTGGCACGGAGCG |
| NO: 3744 | melanoma-associated delayed | TTGGGCACATCTTTG |
| | early response protein | AGATGGATGATAATG |
| | (NAB2) gene, complete cds | ACAGCCAGAAGGAAG |
| SEQ ID | GI 238814315 NG_012264 Homo sapiens | GTGTAGGATCCACTC |
| NO: 3745 | glutathione peroxidase 1 | TTTCCTTTGTGGGAA |
| | (GPX1), RefSeqGene on chromosome 3 | GTCTGGCTCCTGGCC |
| | | TGCATTTCTGCCTTC |
| SEQ ID | GI 237858687 NG_012088 Homo sapiens | CGCCAAATCCTCTTT |
| NO: 3746 | interleukin 10 | GAGCTGAGATCAGAG |
| | (IL10), RefSeqGene on chromosome 1 | GCAACAGGGCTGGAC |
| | | CCAACAGAGTTGAAA |
| SEQ ID | GI 260593670 NG_013025 Homo sapiens | TCTAGTCTTGTCTGC |
| NO: 3747 | nucleotide binding oligomerization | TCATGCTGGGAGGAA |
| | domain containing 1 | GGCGCTCATAGTCAC |
| | (NOD1), RefSeqGene on chromoso [symbol] | AATGGAGCAGGGAAA |
| SEQ ID | GI 557878734 NM_001995 Homo sapiens | GCCCATGAGCTGTTC |
| NO: 3748 | acyl-CoA synthetase long | CGGTATTTTCGAATG |
| | chain family member 1 | CCAGAGCTGGTTGAC |
| | (ACSL1), transcript variant 1, mRNA | TTCCGACAGTACGTG |
| SEQ ID | GI 38505219 NM_017888 Homo sapiens | GGGGACTTTTACATC |
| NO: 3749 | acyl-CoA synthetase medium | ACAGGGGACCGAGCT |
| | chain family member 5 | CGCATGGACAAGGAT |
| | (ACSM5), transcript variant 1, mRNA | GGCTACTTTTGGTTC |
| SEQ ID | GI 520262262 NM_002872 Homo sapiens | ACCAACGCCTTTCCC |
| NO: 3750 | ras-related C3 botulinum toxin substrate 2 | GGAGAGTACATCCCC |
| | (rho family, small GTP binding protein Rac2) | ACCGTGTTTGACAAC |
| | (RA [symbol] | TATTCAGCCAATGTG |
| SEQ ID | GI 30039658 AY273801 Homo sapiens | GCCCTGTCAGAGAGG |
| NO: 3751 | breast cancer 1, early onset | GAGGACACAATATTC |
| | (BRCA1) gene, complete cds | TCTCCTGTGAGCAAG |
| | | ACTGGCACCTGTCAG |
| SEQ ID | GI 22859017 AY148100 Homo sapiens | AGCCTAGCTTAGATA |
| NO: 3752 | colony stimulating factor 3 receptor | GCTGGGAAGGCGGAA |
| | (granulocyte) | GAATGCTCTTCCTCA |
| | (CSF3R) gene, complete cds | CTGCTCCTTTCCCTG |
| SEQ ID | GI 194018739 NG_008192 Homo sapiens | TCTGCAGAGTCTAGC |
| NO: 3753 | CD36 molecule | TATCCGCCAACAGGG |
| | (CD36), RefSeqGene on chromosome 7 | GGTGCCGTCCAAATT |
| | | CATGGCAAATAAAGG |
| SEQ ID | GI 283806588 NG_016341 Homo sapiens | ATTTTGTGCCCTTAA |
| NO: 3754 | cyclin dependent kinase inhibitor 1B | AAGCCACTGGGGATG |
| | (CDKN1B), RefSeqGene on chromosome 12 | ACGGATCCAGGATTG |
| | | TGGGTGGAGGTAGTG |
| SEQ ID | GI 225007613 NG_011612 Homo sapiens | GCTTGGAAGTGCCAG |
| NO: 3755 | upstream transcription factor 1 | CTTTACTACCCATTC |
| | (USF1), RefSeqGene on chromosome 1 | CCTTTACTGCCTCCT |
| | | TCCCATGTCAGGTGG |
| SEQ ID | GI 46361513 AY594694 Homo sapiens | TTCCAGAGGCAATGC |
| NO: 3756 | interferon gamma receptor 1 | CTGAGCAGTCTTGAG |
| | (IFNGR1) gene, complete cds | GGACATACAGGAGTT |
| | | TAGGCACTAGGGGAC |
| SEQ ID | GI 8308037 AF244139 Homo sapiens | TCTGTGGGAACTGGT |
| NO: 3757 | integrin-linked kinase 1 | GACACGGGAGGTACC |
| | (ILK) gene, complete cds | CTTTGCTGACCTCTC |
| | | CAATATGGAGATTGG |
| SEQ ID | GI 189339218 NG_007955 Homo sapiens | TTGAATGGGGAAGGA |
| NO: 3758 | cytochrome P450 family 17 | GAGGTGGAGACCACG |
| | subfamily A member 1 | CCCTCCTCCCTTGTT |
| | (CYP17A1), RefSeqGene on chromosome [symbol] | TAGAATTGTCTTCGT |
| SEQ ID | GI 282394040 NG_016265 Homo sapiens | TGGATCATGGTGGAG |
| NO: 3759 | hephaestin | GTGAGGCCAGAAAGG |
| | (HEPH), RefSeqGene on chromosome X | ACAGTTGAGCACTCA |
| | | TCCCAAAGACAGAGA |
| SEQ ID | GI 342672038 NG_029624 Homo sapiens | ACTTTTCACAGTGGC |
| NO: 3760 | NFKB inhibitor beta | CAACTTGCTAGTGAT |
| | (NFKBIB), RefSeqGene on chromosome 19 | GGTGGCTTGCTTCTG |
| | | TGCAATGGTGCCATC |
| SEQ ID | GI 170932506 NG_007486 Homo sapiens | GTGAGTGAACAAGGG |
| NO: 3761 | protein kinase AMP-activated | CAAGAAGGGAGAGGT |
| | non-catalytic subunit gamma 2 | CAAAGGCTACAGGAG |
| | (PRKAG2), RefSeqGene on chr [symbol] | ACTGACAGGGAGACC |
| SEQ ID | GI 94538326 NM_002038 Homo sapiens | GTATCGCTTTTCTTG |
| NO: 3762 | interferon alpha inducible protein 6 | TGCTACCTGCTGCTC |
| | (IFI6), transcript variant 1, mRNA | TTCACTTGCAGTGGG |
| | | GTGGAGGCAGGTAAG |
| SEQ ID | GI 325588345 HQ995528 Homo sapiens | CAAGTCATGGAGCAC |
| NO: 3763 | testicular nuclear receptor 4 | ATCTGGAAGCTGCAG |
| | (NR2C2) mRNA, complete cds | GAGTTCTGTAACAGC |
| | | ATGGCGAAGCTGGAT |
| SEQ ID | GI 308199420 NG_027788 Homo sapiens | CTCGAGCCTAGCCAA |
| NO: 3764 | MX dynamin like GTPase 1 | GCTAACACATGAAAC |
| | (MX1), RefSeqGene on chromosome 21 | ACACCATCACAGCTG |
| | | GGGAAAGGATGGCTT |
| SEQ ID | GI 1114655579 NM_002969 Homo sapiens | TGAAGGGCCTCCCCG |
| NO: 3765 | mitogen-activated protein kinase 12 | AATTGGAGAAGAAGG |
| | (MAPK12), transcript variant 1, mRNA | ATTTTGCCTCTATCC |
| | | TGACCAATGCAAGCC |
| SEQ ID | GI 269914182 NM_178859 Homo sapiens | CTGAGAGCTAGTGAG |
| NO: 3766 | solute carrier family 51 beta subunit | GGTTCAGAGAAGCCC |
| | (SLC51B), mRNA | CATCCTAAGCCAGAC |
| | | ACATGATGTGGGCTC |
| SEQ ID | GI 1036032362 AH002667 Homo sapiens | GCCATGATGTGGGCA |
| NO: 3767 | cytochrome P450 | CATGAACCCCAACCT |
| | (CYP1A2) gene, complete cds | GGGTGCACAGAGCAA |
| | | GACTCTGTATCTAAA |
| SEQ ID | GI 226492652 NG_011814 Homo sapiens | TGCCCATACCCCTGG |
| NO: 3768 | C-X-C motif chemokine receptor 1 | CCAAGGAAGATCCCT |
| | (CXCR1), RefSeqGene on chromosome 2 | TTGTCCACAAGTAAA |
| | | AGGAAATGCTCCTCC |
| SEQ ID | GI 193290114 NG_008154 Homo sapiens | TGCCAATCCAGAGCT |
| NO: 3769 | insulin receptor substrate 2 | GCTGACACCTTAAAA |
| | (IRS2), RefSeqGene on chromosome 13 | ACACTGGCCTTTAAC |
| | | ACTAGGATGGCCCCA |
| SEQ ID | GI 170014708 NG_007458 Homo sapiens | CTGCCATCATGTTGA |
| NO: 3770 | notch 1 | CACCTGAAGGTTGGA |
| | (NOTCH1), RefSeqGene on chromosome 9 | AAAACCACGGCCTTT |
| | | GTTACTGCCCAAGCA |
| SEQ ID | GI 237858748 NG_012115 Homo sapiens | GAAAAACCAGTTTGG |
| NO: 3771 | phospholipid transfer protein | CTGGAGCCGAATGCA |
| | (PLTP), RefSeqGene on chromosome 20 | AAGGGCAAGAGAGGT |
| | | GAGAGGTGAGACAGA |
| SEQ ID | GI 2828023 AF036905 Homo sapiens | ACTGCCAGGCTCCTA |
| NO: 3772 | linker for activation of T cells | CGACAGCACATCCTC |
| | (LAT) mRNA, complete cds | AGATAGTTTGTATCC |
| | | AAGGGGCATCCAGTT |
| SEQ ID | GI 53759150 NM_005063 Homo sapiens | ACCTCTCGCCATGAT |
| NO: 3773 | stearoyl-CoA desaturase | CAGACATACAGCTGC |
| | (SCD), mRNA | CTACCTAATGAGGAC |
| | | TTCAAGCCCCACCAC |
| SEQ ID | GI 80861465 NM_014331 Homo sapiens | CTCATTAGCAGTTCC |
| NO: 3774 | solute carrier family 7 member 11 | GATCTTTGTTGCCCT |
| | (SLC7A11), mRNA | CTCCTGCTTTGGCTC |
| | | CATGAACGGTGGTGT |
| SEQ ID | GI 62865623 NM_198057 Homo sapiens | TCGGCAGCTGCAGGA |
| NO: 3775 | TSC22 domain family member 3 | AAAGCTGGTCTTTGA |
| | (TSC22D3), transcript variant 1, mRNA | GAACCTCAATACCGA |
| | | CAAGCTCAACAGCAT |
| SEQ ID | GI 187473261 EU595874 Homo sapiens | GGAGCCGTCCTGAAG |
| NO: 3776 | carboxylesterase 3 | ATCAAGACACCAGTG |
| | (brain) | AAATGACCAGGGCAG |
| | (CES3) gene, complete cds | AGTCCAGGAGAAAGA |
| SEQ ID | GI 237820683 NG_012068 Homo sapiens | CTCAGTCAGTGAGGA |
| NO: 3777 | forkhead box 11 | GCAAAGCCAGGACTC |
| | (FOXIl), RefSeqGene on chromosome 5 | AAGTCTGTCTTCAGA |
| | | CTCCAAGCCTACGGC |
| SEQ ID | GI 574290111 NG_033893 Homo sapiens | AAGGAGTCTTGTCGG |
| NO: 3778 | MALTI paracaspase | AATATGGCAAAAGTG |
| | (MALT1), RefSeqGene on chromosome 18 | TTATTCGGCCTGCAG |
| | | CGGAGCAGCTGTTCA |
| SEQ ID | GI 336285218 NG_029143 Homo sapiens | TTTCCTTTCACCTCT |
| NO: 3779 | mitogen-activated protein kinase kinase 5 | GACTGTGGCCTGGTA |
| | (MAP2K5), RefSeqGene on chromosome 15 | ACCCTGGGGTTGTCC |
| | | CTGCTTTTTTCTGAC |
| SEQ ID | GI 238776808 NG_012244 Homo sapiens | TGGCTTTATGATGAT |
| NO: 3780 | SMAD family member 6 | GGGGGCATGCAGGTT |
| | (SMAD6), RefSeqGene on chromosome 15 | GGGTTGGTGCTATGG |
| | | GATAGAGTTGGGAAA |
| SEQ ID | GI 42794766 NM_203351 Homo sapiens | GTCCTACCTGCACAG |
| NO: 3781 | mitogen-activated protein kinase kinase kinase 3 | CAACATGATTGTTCA |
| | (MAP3K3), transcript variant 1, mRNA | CCGGGACATTAAGGG |
| | | AGCCAACATCCTCCG |
| SEQ ID | GI 156546893 NM_001101802 Homo sapiens | AAATGGAAGCGTGGA |
| NO: 3782 | PHD finger protein 21A | TGGTATCAGGGCCCT |
| | (PHF21A), transcript variant 1, mRNA | ACCCGTGGTCTTCTC |
| | | AGATTCTGCTAGAGC |
| SEQ ID | GI 336455032 NG_029156 Homo sapiens | TTGCTCAGGCTATTC |
| NO: 3783 | betaine-homocysteine S-methyltransferase | TCTCTGGATGGAATT |
| | (BHMT), RefSeqGene on chromosome 5 | CCCTTCCCCACCTTC |
| | | TCTGCCTGGCAGTAG |
| SEQ ID | GI 1032528811 NG_050748 Homo sapiens | CCGTGCATTACTGTT |
| NO: 3784 | solute carrier family 4 member 3 | GTCTGACCAGGTATT |
| | (SLC4A3), RefSeqGene on chromosome 2 | GAGGGGCCACCCTCT |
| | | CTCTCACAGGTGTAC |
| SEQ ID | GI 156151447 NG_006672 Homo sapiens | TGTACCCCCTTAAAG |
| NO: 3785 | actin, alpha 1, skeletal muscle | CATGTCCCTGAGTTC |
| | (ACTA1), RefSeqGene on chromosome 1 | ATCACAGAAGACTGC |
| | | TCCTCCTGTGCCCTC |
| SEQ ID | GI 237820648 NG_012041 Homo sapiens | CTGGCCCGCAGATGC |
| NO: 3786 | adenosine monophosphate deaminase 3 | TCATATGTGACAATC |
| | (AMPD3), RefSeqGene on chromosome 11 | TGGAGCTCAACTGAA |
| | | GACCAAGGTTGTCGC |
| SEQ ID | GI 335334987 NG_029076 Homo sapiens | AGGACAGATGAGTTC |
| NO: 3787 | C-X-C motif chemokine receptor 3 | CAATCTATGGAGCAC |
| | (CXCR3), RefSeqGene on chromosome X | TGACCCTACCAGTGC |
| | | AGGCAGTAGGGTTGC |
| SEQ ID | GI 260166681 NM_138387 Homo sapiens | CTTCTCTCTCCCAGA |
| NO: 3788 | glucose-6-phosphatase catalytic subunit 3 | TAAGTTGGTCCTCCC |
| | (G6PC3), transcript variant 1, mRNA | TCTGCCTTTCCTCTC |
| | | AAGCCCCCAAAGAGC |
| SEQ ID | GI 210147537 NM_025106 Homo sapiens | AAGCTCAGGACGTCA |
| NO: 3789 | splA/ryanodine receptor domain | AAAACTCACCATGGA |
| | and SOCS box containing 1 | CCCCAAGGCAGAAAC |
| | (SPSB1), mRNA | CAAGAACTGTCTGCA |
| SEQ ID | GI 343098515 NG_029659 Homo sapiens | CATGTTCACCTGTGA |
| NO: 3790 | bone morphogenetic protein 1 | TCGGTCTTCCTGAGT |
| | (BMP1), RefSeqGene on chromosome 8 | ACATGCAGGCATGGA |
| | | GGCAAACATGCACCT |
| SEQ ID | GI 994323652 NG_032159 Homo sapiens | TCAGATTTCCTCGTT |
| NO: 3791 | CASP2 and RIPK1 domain containing | GCCCCGTCTCATACT |
| | adaptor with death domain | TCCTGTTCCTCTTCT |
| | (CRADD), RefSeqGene on c [symbol] | GGGCTCTGCCAGAAC |
| SEQ ID | GI 341865607 NG_029555 Homo sapiens | CAGCGTCAGTTTCTC |
| NO: 3792 | ETS proto-oncogene 1, transcription factor | AAAAGCAGGACTCAT |
| | (ETS1), RefSeqGene on chromosome 11 | GGTTTCCCCATGCGT |
| | | AAGGTCAGCCCTTCA |
| SEQ ID | GI 342307072 NG_029607 Homo sapiens | CAGAGAATCCCTAAG |
| NO: 3793 | heat shock transcription factor 2 | TTCAGGCAGTGATGG |
| | (HSF2), RefSeqGene on chromosome 6 | CAGCAGCCCTCTCAT |
| | | GTCTAGTGCTGTCCA |
| SEQ ID | GI 306922359 NG_027701 Homo sapiens | ATGAAGTTGATGGGA |
| NO: 3794 | retinoic acid receptor alpha | GGATTACGGTGGTAA |
| | (RARA), RefSeqGene on chromosome 17 | CAGATACTGTGCAGG |
| | | TGCCCAGAGCGAGCT |
| SEQ ID | GI 405778361 NG_032938 Homo sapiens | AGACCTCCATTCCTA |
| NO: 3795 | semaphorin 3B | CTCAAGGGAGGGTAC |
| | (SEMA3B), RefSeqGene on chromosome 3 | ACATCTAGAGGACAG |
| | | AGGACAGGGCACAGC |
| SEQ ID | GI 584458494 NG_033933 Homo sapiens | GCGCTCAGCAAAGTC |
| NO: 3796 | toll like receptor 9 | TTGAGTGGCAGCAGC |
| | (TLR9), RefSeqGene on chromosome 3 | TATGGGGACTGTTCA |
| | | TTCCAAAACGGTAGA |
| SEQ ID | GI 544583587 NM_004683 Homo sapiens | GCCTGTCCTACTCCG |
| NO: 3797 | regucalcin | TGGATGCCTTTGACT |
| | (RGN), transcript variant 1, mRNA | ATGACCTGCAGACAG |
| | | GACAGATCTCCAACC |
| SEQ ID | GI 38202233 NM_052864 Homo sapiens | GTCAAGGCTCCAGGC |
| NO: 3798 | TRAP interacting protein with | AGGTTGTTACTGGTG |
| | forkhead associated domain | TTTGCAGCCTGTCAG |
| | (TIFA), mRNA | TACTTGCAGTACTGG |
| SEQ ID | GI 83026500 DQ309025 Homo sapiens | TCTCAGGCATCTACA |
| NO: 3799 | transforming growth factor | AAGGCTCTCTCTTCC |
| | beta 1 induced transcript 1 | TCCGTCAGAGTCTGG |
| | (TGFBIIl) gene, complete cds | ACTGGGTTCACTGGT |
| SEQ ID | GI 53759124 NM_001295 Homo sapiens | TGGGAGGAAAGTGTC |
| NO: 3800 | C-C motif chemokine receptor 1 | TACTAGGAGGGTGGG |
| | (CCR1), mRNA | GTGAGATTCTGTGTT |
| | | GATGTAGGAGGCCGA |
| SEQ ID | GI 208879434 NM_004895 Homo sapiens | AGCTGCTGCCTCACA |
| NO: 3801 | NLRfamily pyrin domain containing 3 | TCAGCATGTTGTCAG |
| | (NLRP3), transcript variant 1, mRNA | GATCTTGCATCAGTA |
| | | TTGAGCACCAGCCAT |
| SEQ ID | GI 1025608662 NG_047031 Homo sapiens | CTGCTATGACTGTAG |
| NO: 3802 | ATP citrate lyase | CAGGGCTTCCGAAAT |
| | (ACLY), RefSeqGene on chromosome 17 | ACCTGCCTCTCTTGG |
| | | GTGGATCACTGTGGT |
| SEQ ID | GI 259013220 NG_012921 Homo sapiens | AATGGCTGCCTGGGT |
| NO: 3803 | bisphosphoglycerate mutase | TTGGAAGGACAAGTT |
| | (BPGM), RefSeqGene on chromosome 7 | GGAACTGGAGATACC |
| | | CCTGTGAAGTGAAGC |
| SEQ ID | GI 209447084 NG_008733 Homo sapiens | AGCCACTACAGTCAA |
| NO: 3804 | copper chaperone for superoxide dismutase | ATTTCTGTTTGTGGC |
| | (CCS), RefSeqGene on chromosome 11 | CTCCCCCAACCCCTC |
| | | ACTATGGCTGATTGG |
| SEQ ID | GI 254039688 NG_012344 Homo sapiens | GGCTCTGGAGTTAGA |
| NO: 3805 | NFKB inhibitor like 1 | TTGCCTGGATTCAAA |
| | (NFKBIL1), RefSeqGene on chromosome 6 | CCCCAGCTCCAAATC |
| | | CCAGCTCCACACTTC |
| SEQ ID | GI 237858601 NG_012145 Homo sapiens | TATCTGCAGAGGATG |
| NO: 3806 | TNF receptor superfamily member 10b | GCAAGTCTTTGCTCC |
| | (TNFRSF10B), RefSeqGene on chromosome 8 | AAAACCTAAGGGCCT |
| | | GTGCTGTGGTTGACC |
| SEQ ID | GI 145312264 NM_033266 Homo sapiens | TTCTTCTTGGAGCTA |
| NO: 3807 | endoplasmic reticulum | TTGAGCCTGAGCCGA |
| | to nucleus signaling 2 | GAGAAACTTTGGGAC |
| | (ERN2), transcript variant 1, mRNA | TCCGAGCTGCATCCA |
| SEQ ID | GI 61743979 NM_017564 Homo sapiens | CACACTGACAGGAGT |
| NO: 3808 | stabilin 2 | TCTCATTCCTCCCTC |
| | (STAB2), mRNA | CATTGTCCCGATTCT |
| | | GCCCCATCGATGTGA |
| SEQ ID | GI 345110544 NG_029851 Homo sapiens | GATGGGATGGATGTC |
| NO: 3809 | phospholipase D1 | TTGATCCCATGGTGA |
| | (PLD1), RefSeqGene on chromosome 3 | GGGGATCTAGGCAGC |
| | | ACACTACAGCATCCA |
| SEQ ID | GI 308080224 NG_027757 Homo sapiens | GAAGGTGAGGACTTG |
| NO: 3810 | transforming growth | GCCCTTTTGTGGGAC |
| | factor beta receptor 3 | TGAATTGACACTAGT |
| | (TGFBR3), RefSeqGene on chromosome 1 | GTGGCTGGAGTGTGC |
| SEQ ID | GI 197304706 NM_032350 Homo sapiens | CCCCAGAGGAGCAGA |
| NO: 3811 | chromosome 7 open reading frame 50 | GGGTCCTGGAAAGGA |
| | (C7orf50), transcript variant 1, mRNA | AGCTGAAAAAGGAAC |
| | | GGAAGAAAGAGGAGA |
| SEQ ID | GI 666637974 NM_005922 Homo sapiens | CAGCTTCGACATCCA |
| NO: 3812 | mitogen-activated protein | GTCGCGGGACTGCAT |
| | kinase kinase kinase 4 | ATCCAAGAAGCTTGA |
| | (MAP3K4), transcript variant 1, mRNA | GAGGCTCGAATCTGA |
| SEQ ID | GI 1019399995 LT222231 Homo sapiens | TGGCCCCCTGATCTG |
| NO: 3813 | IncRNAfor PRTN3 gene | TGATGGCATCATCCA |
| | | AGGAATAGACTCCTT |
| | | CGTGATCTGGGGATG |
| SEQ ID | GI 196259787 NM_001098531 Homo sapiens | CCAGATGTCTTCCAG |
| NO: 3814 | Rap guanine nucleotide exchange factor 3 | ATTCTGTGCCTCTGG |
| | (RAPGEF3), transcript variant 1, mRNA | CTTTGTTGTCCAGCC |
| | | AGGCCTGCAGTTTAT |
| SEQ ID | GI 126116577 NM_176823 Homo sapiens | GCTCTAAGTGGTCCA |
| NO: 3815 | S100 calcium binding protein A7A | GGAGTCCAAGTAAGC |
| | (S100A7A), mRNA | AGTCTGGCTGGAATA |
| | | AGGCAGCATCACGGA |
| SEQ ID | GI 54781360 AY789109 Homo sapiens | TATCTGGTGATGCAG |
| NO: 3816 | interleukin 3 receptor, alpha | AGACTCTTTCCCCGC |
| | (low affinity) | ATCCCTCACATGAAA |
| | (IL3RA) gene, complete cds | GACCCCATCGGTGAC |
| SEQ ID | GI 284055256 NG_016403 Homo sapiens | GATTGTCAGGGTGGC |
| NO: 3817 | dystrophin related protein 2 | CAAGGCCAAGTATTC |
| | (DRP2), RefSeqGene on chromosome X | CTGTTCATGCCCTTG |
| | | CCACATCTCTGGTAT |
| SEQ ID | GI 393533306 NG_032816 Homo sapiens | TTTGCTGGGTTGGAG |
| NO: 3818 | 5-hydroxytryptamine receptor 1A | GCGGAGTTTATTTGT |
| | (HTRIA), RefSeqGene on chromosome 5 | TACAACCTTGGTCTG |
| | | ACCGGCAGGGATCTG |
| SEQ ID | GI 193211428 NG_008124 Homo sapiens | GAACCTCACAGAGAC |
| NO: 3819 | msh homeobox 2 | CCAGGTCAAAATCTG |
| | (MSX2), RefSeqGene on chromosome 5 | GTTCCAGAACCGAAG |
| | | GGCCAAGGCGAAAAG |
| SEQ ID | GI 22538799 NM_005408 Homo sapiens | GAAGATCTCCTTGCA |
| NO: 3820 | C-C motif chemokine ligand 13 | GAGGCTGAAGAGCTA |
| | (CCL13), mRNA | TGTGATCACCACCAG |
| | | CAGGTGTCCCCAGAA |
| SEQ ID | GI 332078493 NM_002559 Homo sapiens | ACCAAGTCGGTGGTT |
| NO: 3821 | purinergic receptor P2X 3 | GTGAAGAGCTGGACC |
| | (P2RX3), mRNA | ATCGGGATCATCAAC |
| | | CGAGTAGTTCAGCTT |
| SEQ ID | GI 332800978 NM_001206950 Homo sapiens | TACGCCTTCCCCAAG |
| NO: 3822 | solute carrier family 16 member 3 | GCCGTCAGTGTCTTC |
| | (SLC16A3), transcript variant 1, mRNA | TTCAAGGAGCTCATA |
| | | CAGGAGTTTGGGATC |
| SEQ ID | GI 211904170 NG_008937 Homo sapiens | GAGGCCTGCCTCAAA |
| NO: 3823 | CD44 molecule | TATCACTTCCCCTGT |
| | (Indian blood group) | GAAGACTGCCTGGTG |
| | (CD44), RefSeqGene on chromosome 11 | TTCTCCAGGAGAGAG |
| SEQ ID | GI 563317866 NG_033843 Homo sapiens | GCCTGGTGAAGATGT |
| NO: 3824 | DnaJ heat shock protein family | GAAGACCGATACCAG |
| | (Hsp40) member C6 | ACACCAAAGGGCTGC |
| | (DNAJC6), RefSeqGene on chromosome [symbol] | ATTGCCTTCTTCCAA |
| SEQ ID | GI 297747369 NG_021416 Homo sapiens | CAGAGGGTCAAGTCT |
| NO: 3825 | growth hormone releasing hormone receptor | GCTTCCTTGCCTACA |
| | (GHRHR), RefSeqGene on chromosome 7 | TAGCCATGAACTTCC |
| | | CAGATCTAGGCGCCA |
| SEQ ID | GI 257153317 NG_012804 Homo sapiens | AACATCCATGTGACG |
| NO: 3826 | mannosidase beta | GGAAGCCATGGGACA |
| | (MANBA), RefSeqGene on chromosome 4 | GGGTGTAGAACAAGG |
| | | AGAAGCCTGAGAGAG |
| SEQ ID | GI 212549770 NG_008989 Homo sapiens | TGGATGGGAGTGTTG |
| NO: 3827 | matrix metallopeptidase 2 | GGATTTTGAGCTAGG |
| | (MMP2), RefSeqGene on chromosome 16 | GAACTTGGTTTTGGT |
| | | GACCCAGGGCATGAG |
| SEQ ID | GI 340805876 NG_029513 Homo sapiens | GCAGTTTTGGGACTG |
| NO: 3828 | ribosomal protein 56 kinase B1 | GGCAGCTATGGAGGT |
| | (RPS6KB1), RefSeqGene on chromosome 17 | CACATCATTCCTTTG |
| | | CCCTTAGGCTTGAGT |
| SEQ ID | GI 574957130 NM_001815 Homo sapiens | CATTTACTGCCGGAT |
| NO: 3829 | carcinoembryonic antigen | GGACCACAAAGCAGA |
| | related cell adhesion molecule 3 | AGTGGCTTCTTAGCT |
| | (CEACAM3), transcript variant 1 [symbol] | TCCTCCAGGAGCTGC |
| SEQ ID | GI 197313788 NM_001423 Homo sapiens | ATGGAACGCAGTATC |
| NO: 3830 | epithelial membrane protein 1 | ACCACGGCTATTCCT |
| | (EMP1), mRNA | ACATCCTGGGCTGGA |
| | | TCTGCTTCTGCTTCA |
| SEQ ID | GI 188497624 NM_012205 Homo sapiens | GCAGACTCAGTGCAG |
| NO: 3831 | 3-hydroxyanthranilate 3,4-dioxygenase | CACTTCCACACCAAG |
| | (HAAQ), mRNA | AAGGCCCTCAATAAA |
| | | GGCTTCCTGAGGAAC |
| SEQ ID | GI 23510408 NM_003057 Homo sapiens | TGCTGACTCCTGGAA |
| NO: 3832 | solute carrier family 22 member 1 | GCTGGACCTCTTTCA |
| | (SLC22A1), transcript variant 1, mRNA | GTCCTGTTTGAATGC |
| | | GGGCTTCTTGTTTGG |
| SEQ ID | GI 8101110 AF268380 Homo sapiens | TCTTACCCATCTTTT |
| NO: 3833 | melanoma-associated | CAGGCTTCACCCTGA |
| | delayed early response protein | AGAACTGGGAGGCCC |
| | (NAB2) gene, complete cds | TCCACTGAAGAAGCT |
| SEQ ID | GI 82583657 DQ297142 Homo sapiens | CTCAGAGAGGCTGTC |
| NO: 3834 | peroxiredoxin 1 | AGCTGGGAAAAGTTA |
| | (PRDX1) gene, complete cds | TTCTCCTGGGCCCTT |
| | | GAGGCCAAGGTAGAT |
| SEQ ID | GI 299782537 NG_023178 Homo sapiens | GGGGATTGGGGGGTT |
| NO: 3835 | CD14 molecule | GGATAGTGCAGAGTA |
| | (CD14), RefSeqGene on chromosome 5 | TGGTACTGGCCTAAG |
| | | GCACTGAGGATCATC |
| SEQ ID | GI 1145140176 NG_008729 Homo sapiens | TCCGGGGAGAGGCAC |
| NO: 3836 | superoxide dismutase 2 | ATGAGGTGAAATGTT |
| | (SOD2), RefSeqGene on chromosome 6 | TTCCCCCTCCCTTCC |
| | | TTGTTGTCTCTTACT |
| SEQ ID | GI 38505219 NM_017888 Homo sapiens | CTTCGACCCTAAAGA |
| NO: 3837 | acyl-CoA synthetase medium | TGTCAAAGGTGTGCA |
| | chain family member 5 | GCTTCCAAACGGCAT |
| | (ACSM5), transcript variant 1, mRNA | CCCCAGGATCACTGG |
| SEQ ID | GI 50659075 NM_001638 Homo sapiens | GTCTCACTTCTCAAT |
| NO: 3838 | apolipoprotein F | GACTGGACTGTGTGG |
| | (APOF), mRNA | GTACTCTGCTCCAGA |
| | | CATGCGTGGCCTCAG |
| SEQ ID | GI 164695818 AK315628 Homo sapiens | GGCTCACCTTTGCCG |
| NO: 3839 | cDNA, FU96713, Homo sapiens | ACTGCGGGTTCGAAA |
| | ankyrin repeat and SOCS box-containing 2 | GGCCATTGGGAAATA |
| | (ASB2), mRNA | CCGTATAAAACTCCT |
| SEQ ID | GI 2660728 AFO31523 Homo sapiens | GAGGATGAGTGACGA |
| NO: 3840 | bcl-xL/bcl-2 associated death promoter | GTTTGTGGACTCCTT |
| | (BAD) mRNA, complete cds | TAAGAAGGGACTTCC |
| | | TCGCCCGAAGAGCGC |
| SEQ ID | GI 167555126 NM_005582 Homo sapiens | TTCCTGGAACTGGGC |
| NO: 3841 | CD180 molecule | AGGGACTCACTGTGC |
| | (CD180), mRNA | TTTTCTGAGCTTCTT |
| | | ACTCCTGTGAGTCCC |
| SEQ ID | GI 49574531 NM_019884 Homo sapiens | ACTACCGGGCCCCAG |
| NO: 3842 | glycogen synthase kinase 3 alpha | AGCTCATCTTTGGAG |
| | (GSK3A), mRNA | CCACTGATTACACCT |
| | | CATCCATCGATGTTT |
| SEQ ID | GI 151101190 NM_006435 Homo sapiens | AACCCGATCACCGCT |
| NO: 3843 | interferon induced transmembrane protein 2 | GGTCACCATGAACCA |
| | (IFITM2), mRNA | CATTGTGCAAACCTT |
| | | CTCTCCTGTCAACAG |
| SEQ ID | GI 392050748 NM_001267774 Homo sapiens | CTGAACAAGCTGAGG |
| NO: 3844 | intraflagellar transport 20 | GTGTTGGACCCAGAG |
| | (IFT20), transcript variant 1, mRNA | GTTACCCAGCAGACC |
| | | ATAGAGCTGAAGGAA |
| SEQ ID | GI 169790829 NM_001754 Homo sapiens | TTCACCAGGCTGAGA |
| NO: 3845 | runt related transcription factor 1 | CCCTACCCTATGGGG |
| | (RUNX1), transcript variant 1, mRNA | TATATGGGCTTTTAC |
| | | CTGTGCACCAGTGTG |
| SEQ ID | GI 117606575 EF064762 Homo sapiens | TGGGAAATGGCTATC |
| NO: 3846 | chemokine | CTAGATGAGGAAGGA |
| | (C-C motif) ligand 27 | GTCTGTGGCAACAGG |
| | (CCL27) gene, complete cds | CCGAGAATTAGGGCC |
| SEQ ID | GI 94717615 DQ523828 Homo sapiens | GCCATGCAAGGAGGT |
| NO: 3847 | transglutaminase 2 | GTGTGCACGACATAC |
| | (C polypeptide, protein-glutamine- | TAGGCCAAGGGAACT |
| | gamma-glutamyltransferase) | ATGCAAGTGAAAGCT |
| | (TGM2) ge [symbol] | |
| SEQ ID | GI 18073363 AJ277883 Homo sapiens | ACGAGAGCGGGGCCA |
| NO: 3848 | mRNA for sialidase | GGACCTCCTATGATG |
| | (NEU4 gene) | AGATTTCCTTTTGTA |
| | | CATTCTCCCTGCGTG |
| SEQ ID | GI 423091980 JX512648 Homo sapiens | AAGAGTCCACCAGGC |
| NO: 3849 | SH2 domain containing 1A | CATGGACTCAGTGGC |
| | (SH2D1A) mRNA, complete cds | TGTGTATCATGGCAA |
| | | AATCAGCAGGGAAAC |
| SEQ ID | GI 117606567 EF064758 Homo sapiens | AGACAGGGATGATCT |
| NO: 3850 | chemokine | GACTCAAGGCCACTG |
| | (C-C motif) receptor 7 | ACCAGGCTCCCTTTT |
| | (CCR7) gene, complete cds | GCCACATACAAGAGT |
| SEQ ID | GI 966209932 NG_033919 Homo sapiens | GACATCTCCAGGTGG |
| NO: 3851 | dedicator of cytokinesis 1 | GCCACACTTTAGCAT |
| | (DOCK1), RefSeqGene on chromosome 10 | TTCAGTAGGTGCCAT |
| | | GTGTTGCAGTGCTCA |
| SEQ ID | GI 225637493 NG_011688 Homo sapiens | GGCCCTCAGACCAGT |
| NO: 3852 | growth hormone receptor | AGCCAGTATGAAACT |
| | (GHR), RefSeqGene on chromosome 5 | GAAGCCTCTTGACCA |
| | | CAGCCTCCATGAGAG |
| SEQ ID | GI 341865570 NG_029565 Homo sapiens | TGGGCAGTCAGGAAT |
| NO: 3853 | interleukin 24 | CCTGGGAGCTAGGCT |
| | (IL24), RefSeqGene on chromosome 1 | GTGTCTGCCACTGAT |
| | | TGACTATGTGAATCG |
| SEQ ID | GI 345525590 NG_029936 Homo sapiens | GCCTGATAGAAAGAA |
| NO: 3854 | mitogen-activated protein kinase 3 | GGCATGCGCACCTGG |
| | (MAPK3), RefSeqGene on chromosome 16 | GCTCAAACTCCAGCT |
| | | GTGCCACTTAGTAAG |
| SEQ ID | GI 254911084 NG_012516 Homo sapiens | CCAGTGTAGGGGAGG |
| NO: 3855 | moesin | GATGGTGAATGCCTA |
| | (MSN), RefSeqGene on chromosome X | CCTTCTAAATGGCAC |
| | | TCACTGTGAGGTGCT |
| SEQ ID | GI 259013237 NG_012931 Homo sapiens | AATGCTTCCTGCCTA |
| NO: 3856 | ubiquitin C-terminal hydrolase Li | TACTGTGATCCTCAC |
| | (UCHL1), RefSeqGene on chromosome 4 | AAAAGGGCTCTGTCC |
| | | TGTCTGGTGCCAGGA |
| SEQ ID | GI 116006947 NM_001285 Homo sapiens | GCTGTCTCTCAGCGC |
| NO: 3857 | chloride channel accessory 1 | TCCATCCAGCTTGAG |
| | (CLCA1), mRNA | AGTAAGGGATTAACC |
| | | CTCCAGAACAGCCAG |
| SEQ ID | GI 390979633 NM_004135 Homo sapiens | CAGAGCTCATGCTGC |
| NO: 3858 | isocitrate dehydrogenase 3 | ATGTCAAGTCCGTCT |
| | (NAD(+)) gamma | TCAGGCACGCATGTG |
| | (IDH3G), transcript variant 1, mRNA | TACCAGTGGACTTTG |
| SEQ ID | GI 37577125 NM_194315 Homo sapiens | TCGCATTAAGAAAGA |
| NO: 3859 | ubiquitin conjugating enzyme E2 J2 | CCCGGTGCCTTACAT |
| | (UBE2J2), transcript variant 1, mRNA | CTGTGCCGAGCCCCT |
| | | CCCTTCGAATATTCT |
| SEQ ID | GI 48255965 NM_006759 Homo sapiens | GTGGTGAAACTCAAT |
| NO: 3860 | UDP-glucose pyrophosphorylase 2 | GGTGGTTTGGGAACC |
| | (UGP2), transcript variant 1, mRNA | AGCATGGGCTGCAAA |
| | | GGCCCTAAAAGTCTG |
| SEQ ID | GI 1049010878 AH003215 Homo sapiens | AGACCTGACTCTCTT |
| NO: 3861 | CD8 antigen | AAGGAGGCTGAGAGC |
| | (CD8A) gene, complete cds, | CCAAACTGCTGTCCC |
| | alternatively spliced | AAACATGCACTTCCT |
| SEQ ID | GI 328751683 NG_028290 Homo sapiens | GAGAGATTGCTCTGG |
| NO: 3862 | acyl-CoA synthetase long | CACTGGCAGATCAAG |
| | chain family member 6 | CAGATGGAGTGGAGA |
| | (ACSL6), RefSeqGene on chromosome 5 | CAGAGTGTGTGCAGA |
| SEQ ID | GI 1025608652 NG_047034 Homo sapiens | GGATTGCGAGCTGGC |
| NO: 3863 | autocrine motility factor receptor | TGCCGAGTTTTTCGG |
| | (AMFR), RefSeqGene on chromosome 16 | TTGAAGTGATGCACA |
| | | CCACCAACATTCTTG |
| SEQ ID | GI 359465544 NG_031854 Homo sapiens | AGATTCTGCCTCAGA |
| NO: 3864 | glutamate ionotropic | AAGGACGTGGGTTGG |
| | receptor NMDAtype subunit 2B | TGACAATGGCATGGG |
| | (GRIN2B), RefSeqGene on chromoso [symbol] | TTAAAAAGCGGGTCA |
| SEQ ID | GI 307133762 NG_027719 Homo sapiens | GAATCACCTGAGGGT |
| NO: 3865 | glutathione-disulfide reductase | GCCTGGATTCCCGAC |
| | (GSR), RefSeqGene on chromosome 8 | TTAATTGGTCTGAGG |
| | | TGCACTTGGGCTTTG |
| SEQ ID | GI 325910867 NM_004874 Homo sapiens | CTTTTGGAACTGGAT |
| NO: 3866 | BCL2 associated athanogene 4 | TCAGTTGAAACTGGG |
| | (BAG4), transcript variant 1, mRNA | GGCCAGGACTCTGTA |
| | | CGGCAGGCCAGAAAA |
| SEQ ID | GI 332000013 NM_002733 Homo sapiens | CTGTGTTTGTGCATA |
| NO: 3867 | protein kinase AMP-activated | TGAAGGGAGATGGGG |
| | non-catalytic subunit gamma 1 | GTTAGGTGGAGGAGG |
| | (PRKAG1), transcript variant 1 [symbol] | AGAGCAGCGTGGTTA |
| SEQ ID | GI 117606535 EF064742 Homo sapiens | GACACCCACTTGTCT |
| NO: 3868 | chemokine | CGTGGTTCGCTCACT |
| | (C-X-C motif) ligand 16 | TCCTTGTCCCCTACC |
| | (CXCL16) gene, complete cds | TTTTCCGTCTGTCAT |
| SEQ ID | GI 20530138 AF261937 Homo sapiens | GGAGAGGGGACTTTT |
| NO: 3869 | NFKBIE protein | GACATTGCCGTCTTT |
| | (NFKBIE) gene, complete cds | TGTTAGCCTCTCAGC |
| | | CCCAGCCTTTTCCAT |
| SEQ ID | GI 1032528813 NG_050736 Homo sapiens | GTACCTCTTTCTGTG |
| NO: 3870 | complement C3a receptor 1 | GCGGCGAGTCCTCTG |
| | (C3AR1), RefSeqGene on chromosome 12 | AAAATCTGGTGGGGA |
| | | GAGTGGATGAAGCTT |
| SEQ ID | GI 806904734 NG_008957 Homo sapiens | TTCCAGCAATGACCC |
| NO: 3871 | monoamine oxidase A | AGAGGGATGGTGGGG |
| | (MAOA), RefSeqGene on chromosome X | AGACAGGAAACATAG |
| | | ATGGTGAGGCAAGAT |
| SEQ ID | GI 338827642 NG_029226 Homo sapiens | GGCCAAGCCCAGGTG |
| NO: 3872 | nuclear factor of activated T-cells 1 | CAGTATGTTCGTGTG |
| | (NFATC1), RefSeqGene on chromosome 18 | TTTAAGCTTCTTAGA |
| | | TGCTGGGGTGTGGAA |
| SEQ ID | GI 212549746 NG_008982 Homo sapiens | AGGGCATGTTGCATA |
| NO: 3873 | solute carrier family 22 member 5 | ACAAAACAAGCAGCA |
| | (SLC22A5), RefSeqGene on chromosome 5 | TCAAACTTGGGGGAG |
| | | AAGGAAGGCAGCACG |
| SEQ ID | GI 1015539575 AH009651 Homo sapiens | TCTGGCTTTGCTGCT |
| NO: 3874 | xeroderma pigmentosum group C protein | CTGTGGCCATGGCAA |
| | (XPC) gene, complete cds | GTTTCTTACTCTCTC |
| | | TGAGCCTTTGCATCC |
| SEQ ID | GI 88698227 DQ400449 Homo sapiens | GCAGCAGTGGACAGT |
| NO: 3875 | complement component 5 | GCTGTGTATGGAGTC |
| | (C5) gene, complete cds | CAAAGAGGAGCCAAA |
| | | AAGCCCTTGGAAAGA |
| SEQ ID | GI 117606491 EF064720 Homo sapiens | TTGGAAAAACCTGGA |
| NO: 3876 | interleukin 27 | ATCCAGTCCTGGCTT |
| | (IL27) gene, complete cds | CCCACCTTCTGGCTA |
| | | TTTGACCTTGGGCAA |
| SEQ ID | GI 225543278 NG_011648 Homo sapiens | AAAAGATTCCCAAGC |
| NO: 3877 | angiotensin 1 converting enzyme | CAACTGAGTTACCTC |
| | (ACE), RefSeqGene on chromosome 17 | ACGTGGGTCAGGTCT |
| | | CTGTGGCTCTCTGCA |
| SEQ ID | GI 212549770 NG_008989 Homo sapiens | CAGAGGTGTTAGGTG |
| NO: 3878 | matrix metallopeptidase 2 | CTTTTGTGAGCACGT |
| | (MMP2), RefSeqGene on chromosome 16 | CCCAGTCAAGGAAGG |
| | | CTTCACAGATGCAGC |
| SEQ ID | GI 393537030 NM_000151 Homo sapiens | CGCAGACCTCAGGAA |
| NO: 3879 | glucose-6-phosphatase catalytic subunit | TGCCTTCTACGTCCT |
| | (G6PC), transcript variant 1, mRNA | CTTCCCCATCTGGTT |
| | | CCATCTTCAGGAAGC |
| SEQ ID | GI 117606569 EF064759 Homo sapiens | TACAAGCGGCTCAGG |
| NO: 3880 | chemokine | TCCATGACTGATGTG |
| | (C-C motif) receptor 4 | TACCTGCTCAACCTT |
| | (CCR4) gene, complete cds | GCCATCTCGGATCTG |
| SEQ ID | GI 22001412 AF531102 Homo sapiens | GCCCTGCAAACTTTT |
| NO: 3881 | interleukin 1 receptor, type 1 | CTACCCAGGTTCTCA |
| | (IL1R1) gene, complete cds | GCTCCATCTCCTCAA |
| | | CTCACTGGGCTTTGC |
| SEQ ID | GI 306482672 NG_027674 Homo sapiens | AACCGGCCTTGTGAC |
| NO: 3882 | DNA damage inducible transcript 3 | AGTTTCTACTTAAAC |
| | (DDIT3), RefSeqGene on chromosome 12 | TCTGGCTGCCCCCAT |
| | | GAGGGTATGACAGGA |
| SEQ ID | GI 340805836 NG_029500 Homo sapiens | AGCCACTGCCCTAGA |
| NO: 3883 | fatty acid binding protein 6 | TCAAACCTGTAGATG |
| | (FABP6), RefSeqGene on chromosome 5 | TTGGAGTCGGACCCT |
| | | TTTTCTGTCCTGGGG |
| SEQ ID | GI 340138904 NG_029442 Homo sapiens | AAAAGCGTGGCAGCT |
| NO: 3884 | MLX, MAX dimerization protein | GCTTTTAGATCTTAA |
| | (MLX), RefSeqGene on chromosome 17 | GGGCGTTTCTACAGC |
| | | TTTGAGGGCCCTGGT |
| SEQ ID | GI 217035112 NM_152672 Homo sapiens | TTCCCTGGTGCTGGT |
| NO: 3885 | solute carrier family 51 alpha subunit | GGAAATGACCATCAC |
| | (SLC51A), mRNA | CTCGTTTTATGCCGT |
| | | GTGCTTTTACCTGCT |
| SEQ ID | GI 2246432 U45984 Homo sapiens | GGTACATCGCCATTG |
| NO: 3886 | CCR6 chemokine receptor | TACAGGCGACTAAGT |
| | (CMKBR6) gene, complete cds | CATTCCGGCTCCGAT |
| | | CCAGAACACTACCGC |
| SEQ ID | GI 1049010853 AH002961 Homo sapiens | TGAAATGACTGAGTA |
| NO: 3887 | N-ras oncogene | CAAACTGGTGGTGGT |
| | (NRAS) gene, complete cds | TGGAGCAGGTGGTGT |
| | | TGGGAAAAGCGCACT |
| SEQ ID | GI 190194387 NG_008002 Homo sapiens | ACCCTGTTTTTCTGC |
| NO: 3888 | acyl-CoA dehydrogenase, long chain | CCAAATGTTGCCTTT |
| | (ACADL), RefSeqGene on chromosome 2 | TTGGCTTGCCCCTGC |
| | | CTCTATCTTATGCCC |
| SEQ ID | GI 635172888 NG_007045 Homo sapiens | TGGGCAACTCCTTGG |
| NO: 3889 | acyl-CoA dehydrogenase, | GACATGTGGTGCACA |
| | C-4 to C-12 straight chain | TACCAGCAAATGATC |
| | (ACADM), RefSeqGene on chromosome | TGCCCTTTAAGGGAA |
| SEQ ID | GI 299116025 NG_023038 Homo sapiens | AGTTGGACTGACTCC |
| NO: 3890 | autophagy related 16 like 1 | AGTACTGGCCTAATA |
| | (ATG16L1), RefSeqGene on chromosome 2 | ACTGGCAGCGGGTAA |
| | | GTGAAAGGAGCCAGC |
| SEQ ID | GI 359465544 NG_031854 Homo sapiens | GCATTGTGACCCTGG |
| NO: 3891 | glutamate ionotropic receptor | AGGAGGCACCATTTG |
| | NMDA type subunit 2B | TCATTGTGGAAAGTG |
| | (GRIN2B), RefSeqGene on chromoson [symbol] | TGGACCCTCTGAGTG |
| SEQ ID | GI 257153311 NG_012800 Homo sapiens | GCGGGTTGGCTTTTT |
| NO: 3892 | regulator of G protein signaling 2 | GTCCTCCTGCATTCA |
| | (RGS2), RefSeqGene on chromosome 1 | AAATGACATCAGAAT |
| | | CCTGCGGCTGAAGCG |
| SEQ ID | GI 315365062 HQ384162 Homo sapiens | CCCTGTGTAGACCCG |
| NO: 3893 | cell death-inducing DFFA-like effector a | AATCCTGAGTGCTGC |
| | (CIDEA) gene, complete cds | AAGATCTGTATGTGG |
| | | CACAAGCCACTCAGA |
| SEQ ID | GI 336285267 NG_029154 Homo sapiens | AAAGGGAGGGGAGAG |
| NO: 3894 | interferon alpha 2 | AAAAGCCGCAAAGGA |
| | (IFNA2), RefSeqGene on chromosome 9 | AACATCCACAGCCAC |
| | | AAAGGAATGGCTGTA |
| SEQ ID | GI 344925862 NG_029825 Homo sapiens | AAATCAAGGAGCACC |
| NO: 3895 | ubiquitin specific peptidase 2 | CTATAGAAACTGCCC |
| | (USP2), RefSeqGene on chromosome 11 | TGGGCCCATCCACTT |
| | | CTTCTCCACCAGTCA |
| SEQ ID | GI 210032511 NG_008871 Homo sapiens | TCCATGGACATCATG |
| NO: 3896 | xanthine dehydrogenase | GTGTGGGTGGCCTCT |
| | (XDH), RefSeqGene on chromosome 2 | TTACCACTGGCTTGT |
| | | GCTAAAAGCCTTGAC |
| SEQ ID | GI 54112075 AY771350 Homo sapiens | GACTGCTGAGGCCAC |
| NO: 3897 | heme oxygenase | AGCAACTTAACTGGC |
| | (decycling) 2 | TAGTGTGGGTGAGGC |
| | (HMOX2) gene, complete cds | AGAAGTGTTTGAAGC |
| SEQ ID | GI 1036031265 AH007464 Homo sapiens | GGAGAAGGTGTCTGC |
| NO: 3898 | methylenetetrahydrofolate reductase | GGGAGCCGATTTCAT |
| | (MTHFR) gene, complete cds | CATCACGCAGCTTTT |
| | | CTTTGAGGCTGACAC |
| SEQ ID | GI 1036032759 AH002916 Homo sapiens | CGACATTATCAGGTT |
| NO: 3899 | ornithine aminotransferase | TGCGCCTCCGCTGGT |
| | (OAT) gene, complete cds | GATCAAGGAGGATGA |
| | | GCTTCGAGAGTCCAT |
| SEQ ID | GI 994323650 NG_011530 Homo sapiens | CACATCCCCACCTCT |
| NO: 3900 | 2′-5′-oligoadenylate synthetase 1 | CATCTGACCAATGGG |
| | (OAS1), RefSeqGene on chromosome 12 | AGACTCTGAGCAGCT |
| | | GAGTGACTTGGGTTG |
| SEQ ID | GI 747165391 NM_004590 Homo sapiens | CCGAGAAGTCTGCAC |
| NO: 3901 | C-C motif chemokine ligand 16 | CAACCCCAATGACGA |
| | (CCL16), mRNA | CTGGGTCCAAGAGTA |
| | | CATCAAGGATCCCAA |
| SEQ ID | GI 149408121 NM_024119 Homo sapiens | AAGCTCATGGACCAA |
| NO: 3902 | DExH-box helicase 58 | ATCCATGACCACCTG |
| | (DHX58), mRNA | GAGATGCCTGAGTTG |
| | | AGCCGGAAATTTGGG |
| SEQ ID | GI 221316649 NM_005232 Homo sapiens | TTTAGCCACCCGCAT |
| NO: 3903 | EPH receptor A1 | ATTCTGCATCTGGAA |
| | (EPHAl), mRNA | GGCGTCGTCACAAAG |
| | | CGAAAGCCGATCATG |
| SEQ ID | GI 334883185 NG_029065 Homo sapiens | ACCTCTAGGCATTGC |
| NO: 3904 | cAMP responsive element modulator | CTCAGACAGGAAGAA |
| | (CREM), RefSeqGene on chromosome 10 | GGGCTAGAGCCAAAA |
| | | ATTGGGGCTAGCTGA |
| SEQ ID | GI 1024846809 NG_046989 Homo sapiens | TCACAAGATGCTCTC |
| NO: 3905 | matrix metallopeptidase 14 | TGGAGCCAAGGGGGA |
| | (MMP14), RefSeqGene on chromosome 14 | GAAATGGGAATGGAG |
| | | GACCAGAGACAAAGG |
| SEQ ID | GI 1027250665 NG_047132 Homo sapiens | AACCACTCCCAGCAT |
| NO: 3906 | peroxisome proliferator- | TCCTGCATGCCCTCT |
| | activated receptor | TATCCTTCAGGTCCA |
| | gamma, coactivator-related 1 | GCTGTAGTTCCTCTG |
| | (PPRC1), RefSeqC [symbol] | |
| SEQ ID | GI 323362950 NM_138621 Homo sapiens | ACTTGTGACCCCAGC |
| NO: 3907 | BCL2 like 11 | CATGTAGTGAGGGTG |
| | (BCL2L11), transcript variant 1, mRNA | CTCTTTCTCTGTGCC |
| | | TGCTCCTTATGAGTG |
| SEQ ID | GI 33413399 NM_001984 Homo sapiens | TCCAGTGGATCCCCA |
| NO: 3908 | esterase D | AAGGATGTCTATTTT |
| | (ESD), mRNA | TGGCCACTCCATGGG |
| | | AGGTCATGGAGCTCT |
| SEQ ID | GI 32891798 AY341246 Homo sapiens | TGAAAACCACCTCAG |
| NO: 3909 | catechol-O-methyltransferase | CATAGTGTCACCTGC |
| | (COMT) gene, complete cds | TCCTCTGACACTGTC |
| | | GCTTCTCCATGGCAT |
| SEQ ID | GI 66841738 DQ075211 Homo sapiens | TTTCCCAAGGTCACA |
| NO: 3910 | c-src tyrosine kinase | CAGCAAGTTGATGGC |
| | (CSK) gene, complete cds | AGAGCTGGGTACAGG |
| | | ACTCAGAGCATCTGA |
| SEQ ID | GI 1024846791 NG_047016 Homo sapiens | CTCATCTCAGGGCTG |
| NO: 3911 | bactericidal/permeability- | TTGGAAGAAGAGAGT |
| | increasing protein | AAGGGGGTGTCTGTG |
| | (BPI), RefSeqGene on chromosome 20 | AATGTGGGGTGTGGG |
| SEQ ID | GI 388490278 NG_032761 Homo sapiens | ATGCTTTTTGCTGGA |
| NO: 3912 | TNF alpha induced protein 3 | GCGTTTTCTACCGAC |
| | (TNFAIP3), RefSeqGene on chromosome 6 | AGTGACAAGCAGGCT |
| | | TTCCTCTCTGCCAGG |
| SEQ ID | GI 222080101 NM_022121 Homo sapiens | CCACTATGGTGTATG |
| NO: 3913 | PERP, TP53 apoptosis effector | TCATTGTGAGGATGG |
| | (PERP), mRNA | GTGCAGAGAGGCTGG |
| | | GTGGGAGAACGGAAA |
| SEQ ID | GI 336285452 NM_006221 Homo sapiens | CAGACTCGAGGGCCG |
| NO: 3914 | peptidylprolyl cis/trans | AATTGTTTCTAGTTA |
| | isomerase, NIMA-interacting 1 | GGCCACGCTCCTCTG |
| | (PIN1), transcript variant 1, mRNA | TTCAGTCGCAAAGGT |
| SEQ ID | GI 406737 X75342 H. sapiens | CTCTCGCCATGGCCA |
| NO: 3915 | SHB mRNA | AGTGGCTAAACAAGT |
| | | ACTTCAGCTTGGGCA |
| | | ACAGCAAGACCAAGA |
| SEQ ID | GI 460417326 NG_008384 Homo sapiens | CCTCAATCTTAGGGG |
| NO: 3916 | cytochrome P450 family 2 | AAAGGCTGAGGCACC |
| | subfamily C member 19 | AAGCAAGGACACATG |
| | (CYP2C19), RefSeqGene on | CAGACCATTTCCAGG |
| | chromosome [symbol] | |
| SEQ ID | GI 297139781 NG_021374 Homo sapiens | AGGCCTCCCGCTTCT |
| NO: 3917 | early growth response 1 | CTCTCTCCTGCCAGA |
| | (EGR1), RefSeqGene on chromosome 5 | GTCTTTTCCTGACAT |
| | | CTCTCTGAACAACGA |
| SEQ ID | GI 908673232 NG_042289 Homo sapiens | CCCATGGCAGCTTTG |
| NO: 3918 | sodium voltage-gated | TACCTGCCCCTCACC |
| | channel alpha subunit 3 | ACTACCTGAGCCCTT |
| | (SCN3A), RefSeqGene on chromosome 2 | TTCTAGGAACTACTC |
| SEQ ID | GI 187473261 EU595874 Homo sapiens | GAGCATCAGAGGAAA |
| NO: 3919 | carboxylesterase 3 | CAACTGCTGCATTCC |
| | (brain) | AGCATATTGGCACTC |
| | (CES3) gene, complete cds | AGGGAGGGCTTCCTG |
| SEQ ID | GI 42794755 NM_016234 Homo sapiens | TGTCAACAAGGCTGA |
| NO: 3920 | acyl-CoA synthetase long | TATCGCCATGGTGAT |
| | chain family member 5 | CTGTGACACACCCCA |
| | (ACSL5), transcript variant 1, mRNA | AAAGGCATTGGTGCT |
| SEQ ID | GI 1036029324 AHO13155 Homo sapiens | GCCATAACCCCGGAG |
| NO: 3921 | chromosome 19 poliovirus | TCAGAGGGATGCCTG |
| | receptor related 2 | GGTCTTAATCTCCAC |
| | (PVRL2) gene, | TTGTCCTACCTCCTA |
| SEQ ID | GI 54112083 AY771996 Homo sapiens | GTGTGAGCAGGAGAG |
| NO: 3922 | interleukin 12 receptor, beta 1 | GCACATGACTGGACT |
| | (IL12RB1) gene, complete cds | CAGATGTTCACAGAC |
| | | TTTCCCTGGCTCCTG |
| SEQ ID | GI 440503006 JX512449 Homo sapiens | GAGACCTGAGTCTTG |
| NO: 3923 | mitogen-activated protein kinase 1 | GTCCCTGCTTCTGAT |
| | (MAPK1) gene, complete cds | GACATGTCACATGGG |
| | | CATGTGCTCGTCACT |
| SEQ ID | GI 50234988 AY675320 Homo sapiens | TGATGGAGGCCAGCA |
| NO: 3924 | RAD21 homolog | GAACAAACATAGATG |
| | (S. pombe) | AGTCAGCTATGCCTC |
| | (RAD21) gene, complete cds | CACCACCACCTCAGG |
| SEQ ID | GI 259013222 NG_012922 Homo sapiens | GCGGTTTTAGTGGTT |
| NO: 3925 | glycogen synthase kinase 3 beta | AGAAGCCGCAGGTAA |
| | (GSK3B), RefSeqGene on chromosome 3 | GGTCCTTCCCAGGCC |
| | | AGCTCAAGTTTTTCC |
| SEQ ID | GI 224809244 NG_011449 Homo sapiens | GAATCCAGTATGCAA |
| NO: 3926 | 3-hydroxy-3-methylglutaryl-CoA reductase | TGGATGTCGCACACA |
| | (HMGCR), RefSeqGene on chromosome 5 | AGAGAGAGAGACGCA |
| | | GGTGACCGGAGCCAT |
| SEQ ID | GI 300796044 NG_023367 Homo sapiens | GGCAGCCTTCCTAGG |
| NO: 3927 | platelet derived growth | TTCTTCCTGTCTTCC |
| | factor receptor beta | AAGTGCTAGCCATGC |
| | (PDGFRB), RefSeqGene on chromosome 5 | ACTTTGTGCTGAAGC |
| SEQ ID | GI 1024846788 NG_047009 Homo sapiens | TTCACCCTGGTCTGC |
| NO: 3928 | platelet and endothelial | TCTGAAGTTTGGATA |
| | cell adhesion molecule 1 | CAAGTCCTGACCCAT |
| | (PECAM1), RefSeqGene on chromosome | GGGCATGGTTCAGGA |
| SEQ ID | GI 242247668 NM_032962 Homo sapiens | TGAGTGACCCAGAAG |
| NO: 3929 | C-C motif chemokine ligand 14 | GGGTGGCGAAGGCAC |
| | (CCL14), transcript variant 2, mRNA | AGCTCAGAGACATAA |
| | | AGAGAAGATGCCAAG |
| SEQ ID | GI 325652112 NM_020997 Homo sapiens | TGTTCGAGGGTACCA |
| NO: 3930 | left-right determination factor 1 | GGAGAGCTGGCGATG |
| | (LEFTY1), mRNA | ACTGAACTGCTGATG |
| | | GACAAATGCTCTGTG |
| SEQ ID | GI 385137136 NM_012340 Homo sapiens | TGGAAGCCACGGTGG |
| NO: 3931 | nuclear factor of activated T-cells 2 | ATAAGGACAAGAGCC |
| | (NFATC2), transcript variant 1, mRNA | AGCCCAACATGCTTT |
| | | TTGTTGAGATCCCTG |
| SEQ ID | GI 117606467 EF064708 Homo sapiens | GTGCCCTGCATCTTG |
| NO: 3932 | tumor necrosis factor | AGGCTTGGGTCTGTC |
| | (ligand) family, member 10 | CAATAATTTTAAGCC |
| | (TNFSF10) gene, complete cds | CCTGGGCTCTGCTAC |
| SEQ ID | GI 359718928 NG_031876 Homo sapiens | CTCTTCACAGGTCAG |
| NO: 3933 | biliverdin reductase A | TGCTACGTGGGATCA |
| | (BLVRA), RefSeqGene on chromosome 7 | CAGGTCACATGTGAG |
| | | GTCCAAAGACCAGCC |
| SEQ ID | GI 226491119 NG_011810 Homo sapiens | GTGAGAACCATAGGA |
| NO: 3934 | 1,4-alpha-glucan branching enzyme 1 | ATACACCCACTGCGG |
| | (GBE1), RefSeqGene on chromosome 3 | TGCCCAGGTGTGACC |
| | | AGGTGCAGATATTCT |
| SEQ ID | GI 1145587777 KX533498 Homo sapiens | CGATGGGGGTCTCAT |
| NO: 3935 | macrophage receptor | TGGCCCAAAAGGGGA |
| | (MARCO) mRNA, complete cds | AACTGGAACTAAGGG |
| | | AGAGAAAGGAGACCT |
| SEQ ID | GI 41324131 AY527817 Homo sapiens | ATGATCAGAAAGGGG |
| NO: 3936 | arachidonate 12-lipoxygenase | CCTGGCCATTTGACA |
| | (ALOX12) gene, complete cds | GGTGGTCAGTTTACA |
| | | ATGCCTGTGATGCCA |
| SEQ ID | GI 922304389 NG_042830 Homo sapiens | CAGTACCTGAAGAGG |
| NO: 3937 | acyl-CoA dehydrogenase family member 11 | ATGATGCCCTCATAC |
| | (ACAD11), RefSeqGene on chromosome 3 | TGCCAGGTGGGATGA |
| | | AAGTCCAGGCATCCC |
| SEQ ID | GI 350606343 NG_030328 Homo sapiens | CACCCGTTGGTTTGA |
| NO: 3938 | neuropilin 1 | AGAAGGGCGGGCTCT |
| | (NRP1), RefSeqGene on chromosome 10 | CACATAAGCAACCAG |
| | | GTAAGGAAAGGAAGC |
| SEQ ID | GI 340007370 NG_029431 Homo sapiens | CCACTTTCTTCCTCA |
| NO: 3939 | ras-related C3 botulinum toxin substrate 1 | GCTGCCACATCCAAA |
| | (rho family, small GTP binding protein Rael) | CCATGGGTAAGCGAT |
| | (RAC [symbol] | GCTTGATCTGCCTCC |
| SEQ ID | GI 264681561 NM_018441 Homo sapiens | TTCTAAGGGATGGCA |
| NO: 3940 | peroxisomal trans-2-enoyl-CoA reductase | CGCTGTGCTTGAGAC |
| | (PECR), mRNA | CAACCTGACGGGTAC |
| | | CTTCTACATGTGCAA |
| SEQ ID | GI 520262262 NM_002872 Homo sapiens | CAACCAGCCCCTGCC |
| NO: 3941 | ras-related C3 botulinum toxin substrate 2 | ATTTCTTAAGACTTT |
| | (rho family, small GTP binding protein Rac2) | CTGCTGCACTCACAG |
| | (RA+z,899 | GATCCTGAGCTGCAC |
| SEQ ID | GI 229608964 NM_014600 Homo sapiens | TCCCAAGAAACCCTT |
| NO: 3942 | EH domain containing 3 | CAGGAAACTCAACGC |
| | (EHD3), mRNA | CTTTGGCAACGCCTT |
| | | CTTGAACAGGTTCGT |
| SEQ ID | GI 345842406 NM_005849 Homo sapiens | GGACTACACTCATGA |
| NO: 3943 | immunoglobulin superfamily member 6 | GGCCGTCACCATAAA |
| | (IGSF6), mRNA | GTGTACCTTCTCCGC |
| | | AACCGGATGCCCTTC |
| SEQ ID | GI 289546502 NM_001172567 Homo sapiens | CCAGGCTGGAGCAAG |
| NO: 3944 | myeloid differentiation primary response 88 | GTACCTTTTCTTAGG |
| | (MYD88), transcript variant 1, mRNA | ATCTTGGGAGGGAAT |
| | | GGATGCCCCTCTCTG |
| SEQ ID | GI 22027540 NM_005707 Homo sapiens | TAGGAGGCTGCTAGT |
| NO: 3945 | programmed cell death 7 | TAGGAAGATGGCAGT |
| | (PDCD7), mRNA | GGCTGTAGGCTGGGT |
| | | TGCCAGAAAAGATGG |
| SEQ ID | GI 94557300 NM_006251 Homo sapiens | GGTAGCCTGGGGCTA |
| NO: 3946 | protein kinase AMP-activated | GATGTGGAACTCCAT |
| | catalytic subunit alpha 1 | GGATCTGTGTTCTGA |
| | (PRKAA1), transcript variant 1, mRNA | CTGGCACCTTTGGAA |
| SEQ ID | GI 36030972 NM_181713 Homo sapiens | GTCTACGAAGCCTGT |
| NO: 3947 | UBX domain protein 2A | GTTCCAGCCCTTTTC |
| | (UBXN2A), mRNA | AGGACAGGGTCACAG |
| | | ACTAGGAAGTGCCAC |
| SEQ ID | GI 14278706 AF378903 Homo sapiens | GAGTTCCCAGAAGCT |
| NO: 3948 | protein C | TGTCTCTGCTTTTCT |
| | (PROC) gene, complete cds | AGGCAGCTGCCACAG |
| | | CCTGTCACAAACAGC |
| SEQ ID | GI 514052655 NM_001278549 Homo sapiens | AGTGCCCTCATTTAA |
| NO: 3949 | pyruvate dehydrogenase kinase 1 | GAGGCCAAGATCCTG |
| | (PDK1), transcript variant 1, mRNA | ATTCAGAGGAGGCAT |
| | | CCTTTGCCCAGAGCT |
| SEQ ID | GI 46241839 AY588246 Homo sapiens | GTTCACCTGCTTGAG |
| NO: 3950 | epidermal growth factor receptor | GTCAGTTCCTTGAGC |
| | (erythroblastic leukemia viral | GTCTTCCACTTGCCA |
| | (v-erb-b) oncogene homolog, a [symbol] | TGTTCACCACAGTGC |
| SEQ ID | GI 282394040 NG_016265 Homo sapiens | AGTGTCACCCTTCTG |
| NO: 3951 | hephaestin | CTCGTTGTTCTGGCT |
| | (HEPH), RefSeqGene on chromosome X | CTTGGTGGAGTGGTT |
| | | TGGTACCAACATCGA |
| SEQ ID | GI 254911080 NG_012514 Homo sapiens | CACACCTGGATGATT |
| NO: 3952 | interleukin 13 receptor subunit alpha 2 | GCCATTGCTTCCAAA |
| | (IL13RA2), RefSeqGene on chromosome X | ATGACGGTCGCTCTG |
| | | CTCCCAATCTCTCCC |
| SEQ ID | GI 1212890194 NG_032955 Homo sapiens | AAATGTGATGGGGTT |
| NO: 3953 | mitogen-activated protein | CTGCAGTTAGATGAG |
| | kinase 8 interacting protein 2 | TCTGAAAGTGGGGCT |
| | (MAPK8IP2), RefSeqGene on chror [symbol] | GGGGCTGCTCTGAGA |
| SEQ ID | GI 22538799 NM_005408 Homo sapiens | TGTCTCTAAGCCCCC |
| NO: 3954 | C-C motif chemokine ligand 13 | TTCCCTTCCACTATG |
| | (CCL13), mRNA | AGCTGCTGGCAGTGG |
| | | GTTTGTATTCGGTTC |
| SEQ ID | GI 54781368 AY791292 Homo sapiens | CCCCACCCCTTTTCC |
| NO: 3955 | cyclin GI | CCCTTTCCAGAGTTT |
| | (CCNG1) gene, complete cds | TGTTCTGTGGCATTG |
| | | CCTTGGGTAAGTACA |
| SEQ ID | GI 1036032447 AH002989 Homo sapiens | TGCCTCTCAGTGTCT |
| NO: 3956 | pp60 c-src-1 protein | GACTTCGACAACGCC |
| | (SRC) gene, complete cds | AAGGGCCTCAACGTG |
| | | AAGCACTACAAGATC |
| SEQ ID | GI 193788644 NG_008170 Homo sapiens | TTAGTGGACTGGAAA |
| NO: 3957 | branched chain amino acid transaminase 1 | CCAAGTGAACCTGGA |
| | (BCAT1), RefSeqGene on chromosome 12 | AACCACAAGCAGCTG |
| | | TGGCAAATCCTGCCA |
| SEQ ID | GI 225735562 NG_011713 Homo sapiens | GGAAGAGAGCCAAAT |
| NO: 3958 | insulin like growth factor 1 | GCAAACCAGACGATA |
| | (IGF1), RefSeqGene on chromosome 12 | TCCCAGCTGGTTTGA |
| | | ATGGCCTCCACCGTG |
| SEQ ID | GI 699969198 NG_041780 Homo sapiens | GCTGTTGGCTGGAGG |
| NO: 3959 | NLR family CARD domain containing 4 | CCTCACTTCCTCATC |
| | (NLRC4), RefSeqGene on chromosome 2 | ATTAGACCTCTTCAC |
| | | AGGCTGTGAGTGTCC |
| SEQ ID | GI 306922359 NG_027701 Homo sapiens | ATGAAGGGACTCCTG |
| NO: 3960 | retinoic acid receptor alpha | CAGTCCATGAGGAAG |
| | (RARA), RefSeqGene on chromosome 17 | AGGACAGAAGTGAGC |
| | | GCCCAACCAAAATGA |
| SEQ ID | GI 874507494 NG_042223 Homo sapiens | AAAAGCCCCTGTTCC |
| NO: 3961 | tubulin beta 2A class Ila | AAGGACATGGGAGGA |
| | (TUBB2A), RefSeqGene on chromosome 6 | GGACAAGGCCATCCT |
| | | TAGTGACATTCAGGA |
| SEQ ID | GI 256600243 NG_012682 Homo sapiens | CTACAGGGCGGCAAC |
| NO: 3962 | versican | CAGCAGGTACACACT |
| | (VCAN), RefSeqGene on chromosome 5 | GAATTTTGAGGCTGC |
| | | TCAGAAGGCTTGTTT |
| SEQ ID | GI 70995210 NM_001398 Homo sapiens | TGTCCAGCTCAACCG |
| NO: 3963 | enoyl-CoA hydratase 1 | GCCCAACAAGAGGAA |
| | (ECH1), mRNA | TGCCATGAACAAGGT |
| | | CTTCTGGAGAGAGAT |
| SEQ ID | GI 372466583 NM_005239 Homo sapiens | GGACCCAGGAAAGGC |
| NO: 3964 | ETS proto-oncogene 2, transcription factor | AGGATTGAAAATGTC |
| | (ETS2), transcript variant 1, mRNA | CAGGAAAGTGGCCAA |
| | | GAAGCAGTGGCCTTA |
| SEQ ID | GI 1003088850 NM_007368 Homo sapiens | CCTCTCTACAGCATT |
| NO: 3965 | RAS p21 protein activator 3 | CCCATCGAGAACATC |
| | (RASA3), transcript variant 1, mRNA | CTGGCAGTGGAGAAG |
| | | CTGGAGGAGGAGTCT |
| SEQ ID | GI 440502998 JX512445 Homo sapiens | TAAGGGAGCTATGGG |
| NO: 3966 | integrin, alpha V | ATGTGTGGAGGAGTG |
| | (ITGAV) gene, complete cds | TTTGCCACAGAGGAA |
| | | CTGGCAGTTTCAGCA |
| SEQ ID | GI 70995210 NM_001398 Homo sapiens | CGTGAAGTCGGTCCA |
| NO: 3967 | enoyl-CoA hydratase 1 | GGCCACGACTGAGAA |
| | (ECH1), mRNA | CAAGGAACTGAAAAC |
| | | CGTCACCTTCTCCAA |
| SEQ ID | GI 217035112 NM_152672 Homo sapiens | TGCCATCTTCCTGGA |
| NO: 3968 | solute carrier family 51 alpha subunit | GGATGCCGTCTACCT |
| | (SLC51A), mRNA | GTACAAGAACACCCT |
| | | TTGCCCCATCAAGAG |
| SEQ ID | GI 1049010968 AH002726 Homo sapiens | TCCGGGACTGGGATC |
| NO: 3969 | c-fgr peptide | AGACCAGAGGCGATC |
| | (FGR) gene, complete cds | ATGTGAAGCATTACA |
| | | AGATCCGCAAACTGG |
| SEQ ID | GI 225735573 NG_011718 Homo sapiens | TAAACGTGGAACCCC |
| NO: 3970 | alcohol dehydrogenase 1C | AGAGTGGCTTGTGTC |
| | (class 1), gamma polypeptide | CTGGTGGACCTAAAG |
| | (ADHIC), RefSeqGene on chromoso [symbol] | TGGTGCACATGATCT |
| SEQ ID | GI 237874189 NG_012169 Homo sapiens | GAAAGACTCCCTTGC |
| NO: 3971 | angiopoietin like 4 | CTGGCCTCAGCGGAT |
| | (ANGPTL4), RefSeqGene on chromosome 19 | GGAGATTTGGAAGGA |
| | | TGGATGAGTGGATGA |
| SEQ ID | GI 582015216 NG_016002 Homo sapiens | TGCTGTTGAGCTTGG |
| NO: 3972 | G protein subunit alpha i2 | CCAGAGTACCCAAGT |
| | (GNAI2), RefSeqGene on chromosome 3 | TTGACCTCTGCACAG |
| | | ACCTTACTACCCACC |
| SEQ ID | GI 1139349906 NG_052802 Homo sapiens | TGCCAATGTCCTGAA |
| NO: 3973 | NLR family pyrin domain containing 4 | GGACGAAGGACTGAA |
| | (NLRP4), RefSeqGene on chromosome 19 | AACTCTCTGCGAGGC |
| | | CTTGAAACATCCGGA |
| SEQ ID | GI 1152003149 NG_016599 Homo sapiens | TGCTGCTTCATGCCT |
| NO: 3974 | phosphorylase kinase regulatory subunit alpha 1 | GACAATATTCTGATC |
| | (PHKA1), RefSeqGene on chromosome X | TTTGTCAGTGTCTCA |
| | | GCCCTCCCCACCCCT |
| SEQ ID | GI 345478701 NG_029901 Homo sapiens | GAAGGGCTGTACCCC |
| NO: 3975 | peroxiredoxin 2 | ATGACACAGCTAGAG |
| | (PRDX2), RefSeqGene on chromosome 19 | GAGGATGGGGACTCT |
| | | TAACACAGGCTCTCT |
| SEQ ID | GI 167614484 NM_006111 Homo sapiens | ACGAATTAAGGCGTC |
| NO: 3976 | acetyl-CoA acyltransferase 2 | GAGGTGGAAAATATG |
| | (ACAA2), mRNA | CCGTTGGATCAGCTT |
| | | GCATTGGAGGTGGCC |
| SEQ ID | GI 156523973 NM_001296 Homo sapiens | ATGAAGTGGCCTTCA |
| NO: 3977 | atypical chemokine receptor 2 | TGCTCTGCAGGAAGG |
| | (ACKR2), mRNA | ATGCAGTGGTGTCCT |
| | | TTGGCAAAGTCTTCC |
| SEQ ID | GI 68215223 NM_003965 Homo sapiens | GCACTGAATTTGTCT |
| NO: 3978 | C-C motif chemokine receptor like 2 | CAGGCACCGTGCAAG |
| | (CCRL2), transcript variant 1, mRNA | GCTCTTTACAAACGT |
| | | GAGCTCCTTCGCCTC |
| SEQ ID | GI 156523967 NM_001618 Homo sapiens | GCAAAGGCCAGGATG |
| NO: 3979 | poly(ADP-ribose) polymerase 1 | GAATTGGTAGCAAGG |
| | (PARP1), mRNA | CAGAGAAGACTCTGG |
| | | GTGACTTTGCAGCAG |
| SEQ ID | GI 18765742 NM_003098 Homo sapiens | GTGGGGGATGCCATC |
| NO: 3980 | syntrophin alpha 1 | CTGTCTGTGAATGGG |
| | (SNTA1), mRNA | GAAGACTTGTCCTCT |
| | | GCTACCCATGATGAG |
| SEQ ID | GI 209977025 NG_008836 Homo sapiens | GGAACTTCAAGGATC |
| NO: 3981 | angiotensinogen | CATCATGGGATGCAG |
| | (AGT), RefSeqGene on chromosome 1 | GACAGTAGGCTCCAC |
| | | CCCTCTTCCTGCTTT |
| SEQ ID | GI 260593639 NG_013007 Homo sapiens | CCTGGGACCACCAGT |
| NO: 3982 | C-reactive protein | AGCCATCTTGTTTGC |
| | (CRP), RefSeqGene on chromosome 1 | CACATGGAGAGAGAC |
| | | TGTGAGGACAGAAGC |
| SEQ ID | GI 212549728 NG_008977 Homo sapiens | ACGTGGAACTTAGTG |
| NO: 3983 | methylmalonyl-CoA epimerase | GTCTCCCTGAGTTGC |
| | (MCEE), RefSeqGene on chromosome 2 | GGAGATAGGAGTTGG |
| | | AAGTCTGAGGAGGCC |
| SEQ ID | GI 209977032 NG_008779 Homo sapiens | AGAAAGCAGCCCTCT |
| NO: 3984 | paraoxonase 1 | ACCTCCGAAAAACAG |
| | (PON1), RefSeqGene on chromosome 7 | CAAGACGTTGCTTTC |
| | | CTGCCATAAACGCCC |
| SEQ ID | GI 194239686 NM_004591 Homo sapiens | AGCCCAAGAACAGAA |
| NO: 3985 | C-C motif chemokine ligand 20 | AGAACCTTGCTGGGG |
| | (CCL20), transcript variant 1, mRNA | TTGGAGGTTTCACTT |
| | | GCACATCATGGAGGG |
| SEQ ID | GI 237874277 NG_012191 Homo sapiens | CTTTTGCACTTGCTA |
| NO: 3986 | BCL2 associated X, apoptosis regulator | ATTCCTTCTGCGCTG |
| | (BAX), RefSeqGene on chromosome 19 | GGGAGAGCTCAAACC |
| | | CTGCCCGAAACTTCT |
| SEQ ID | GI 341865570 NG_029565 Homo sapiens | ATGGCTGCTGAGTTC |
| NO: 3987 | interleukin 24 | CAGAAGGCAAAGACA |
| | (IL24), RefSeqGene on chromosome 1 | CAGAGATGGCTCAGC |
| | | TCCATCAAGTGGAGT |
| SEQ ID | GI 153082754 NM_001547 Homo sapiens | GCTGCCATCTGCCAC |
| NO: 3988 | interferon induced protein | CTGCTACCATTGACC |
| | with tetratricopeptide repeats 2 | TACGTGAACACAGAC |
| | (IFIT2), mRNA | ATTCTGTCTCCACCT |
| SEQ ID | GI 169234615 NM_002514 Homo sapiens | GTTTGGTAAAAGCGA |
| NO: 3989 | nephroblastoma overexpressed | GAGGGGAAAGCCTGA |
| | (NOV), mRNA | GCATGCAGAGTGTGC |
| | | AGAGCACGAGCTTTT |
| SEQ ID | GI 197100280 NG_008374 Homo sapiens | CAAAGATCTCAGCAG |
| NO: 3990 | cytochrome P450 family | CCAGCTCCTGGTAGC |
| | 11 subfamily B member 2 | TGATGAGGATCAGAG |
| | (CYP11B2), RefSeqGene on chromosome [symbol] | CGTTTGTTCCCCCAT |
| SEQ ID | GI 168480137 NG_007294 Homo sapiens | ACACCACCCTGTTAA |
| NO: 3991 | hydroxyacyl-CoA dehydrogenase/ | GCCCAGGTGGTGAAG |
| | 3-ketoacyl-CoA thiolase/enoyl-CoA hydratase | AGCTGGTTAGGTTGG |
| | (trifunctiona [symbol] | TCATTTGCAAAACCG |
| SEQ ID | GI 282394040 NG_016265 Homo sapiens | ATGTGCCCAGCCTGC |
| NO: 3992 | hephaestin | CTGGAGAAAAGTGTC |
| | (HEPH), RefSeqGene on chromosome X | TGCTCCTAGCCAAGA |
| | | TCTCCTCATCACAAA |
| SEQ ID | GI 237858735 NG_012106 Homo sapiens | TTCTCTGCCCCCTGT |
| NO: 3993 | 8-oxoguanine DNA glycosylase | TGCTGCTACTGTGGT |
| | (OGG1), RefSeqGene on chromosome 3 | TCCAAACCCTTACCA |
| | | TCTCCTGCCTGTATC |
| SEQ ID | GI 498917180 NM_032375 Homo sapiens | CAGAGACCTCCGGGG |
| NO: 3994 | AKT1 substrate 1 | AGCAGCTGGGCATTA |
| | (AKT1S1), transcript variant 1, mRNA | GTGATAATGGAGGGC |
| | | TCTTTGTGATGGATG |
| SEQ ID | GI 156142193 NM_005880 Homo sapiens | AAAGCAGCAGCCATC |
| NO: 3995 | DnaJ heat shock protein family | ATGGACCTGGAGTGC |
| | (Hsp40) member A2 | AGTGTGCCCATCAGT |
| | (DNAJA2), mRNA | AAACTCTGCAAACAA |
| SEQ ID | GI 8248053 AF199441 Homo sapiens | CAGGAAAGCAGGAAG |
| NO: 3996 | gastrointestinal glutathione peroxidase | GCTGAAGCATCACTG |
| | (GPX2) gene, complete cds | GCTGTGACAAACCTG |
| | | AGCCCAAACTGTTCA |
| SEQ ID | GI 297139734 NG_021330 Homo sapiens | TCACACATGTAACAG |
| NO: 3997 | serum amyloid A1 | GTGCAGAGCCAAGAC |
| | (SAA1), RefSeqGene on chromosome 11 | TGCAGGCTGGTTTGT |
| | | CTGACTCCAGAACCT |
| SEQ ID | GI 61744441 NM_003262 Homo sapiens | TGCCAGTCCCTGCAC |
| NO: 3998 | SEC62 homolog, preprotein | TCTTCCTTTCTGGCC |
| | translocation factor | AAGGATGATGTCAGT |
| | (SEC62), mRNA | TCTGCTGCTACTAGC |
| SEQ ID | GI 190194409 NG_008004 Homo sapiens | TAAAAGGCGCAACCA |
| NO: 3999 | activin A receptor type 1 | AGAACGCCTCAATCC |
| | (ACVR1), RefSeqGene on chromosome 2 | CCGAGACGTGGAGTA |
| | | TGGCACTATCGAAGG |
| SEQ ID | GI 368711279 NG_031983 Homo sapiens | CCACACCCCAACCTA |
| NO: 4000 | heat shock protein family B | AGAGTGCACATCTGT |
| | (small) member 6 | GTGCCTAGCCTGATC |
| | (HSPB6), RefSeqGene on chromosome 19 | CAGGATTCACGTGAG |
| SEQ ID | GI 189458878 NM_139166 Homo sapiens | GCGTGCCAGGAAACA |
| NO: 4001 | actin binding Rho activating protein | TGGACTGGTAGACTT |
| | (ABRA), mRNA | TGAAGGAGAGATGCT |
| | | ATGGCAAGGCCGAGA |
| SEQ ID | GI 584458490 NG_012645 Homo sapiens | GGAGACCCTTGCCAA |
| NO: 4002 | FK506 binding protein 5 | CATCACAGCTAGGGT |
| | (FKBP5), RefSeqGene on chromosome 6 | CTTACTTGCCTTCCG |
| | | TGTGAGTAAGGCCAG |
| SEQ ID | GI 1135567463 NG_052785 Homo sapiens | AGGACGACCACACGC |
| NO: 4003 | galanin and GMAP prepropeptide | CGCTTCCTGTAGCAT |
| | (GAL), RefSeqGene on chromosome 11 | GTGTCGTGGTTGTAA |
| | | TTCTCTCATGTGCAT |
| SEQ ID | GI 1143077144 NG_052854 Homo sapiens | GGTCTCTCTCCAGAC |
| NO: 4004 | gem nuclear organelle associated protein 5 | CTTGCCCAAATTCCA |
| | (GEMIN5), RefSeqGene on chromosome 5 | GTGTCTGGGTAAGGG |
| | | CTGGTCACAGAACAC |
| SEQ ID | GI 308080224 NG_027757 Homo sapiens | TAGTCAATAGGCGGT |
| NO: 4005 | transforming growth factor beta receptor 3 | CACTGGTGACCATAA |
| | (TGFBR3), RefSeqGene on chromosome 1 | CAGGATGCATTTCAG |
| | | GGCAGTGGTTGCGGA |
| SEQ ID | GI 63477961 NM_000911 Homo sapiens | TACAACTGAGTCCTT |
| NO: 4006 | opioid receptor delta 1 | AAACAGGGCATCTCC |
| | (OPRD1), mRNA | AGGAAGGCGGGGCTT |
| | | CAACCTTGAGACAGC |
| SEQ ID | GI 67515408 DQ080435 Homo sapiens | GTTCCCCCAAACTGC |
| NO: 4007 | calcitonin/calcitonin- | AATTGGGGTTGGAGC |
| | related polypeptide, alpha | ACCTGGAAAGAAAAG |
| | (CALCA) gene, complete cds | GGATATGTCCAGCGA |
| SEQ ID | GI 21655314 AY124010 Homo sapiens | TTTGGCTGTGGCCTC |
| NO: 4008 | interleukin 1 receptor, type II | TTCCAGTAATTGCTC |
| | (IL1R2) gene, complete cds | TGCTGGGAAAGTCAT |
| | | TGGCCAAGGATGCTC |
| SEQ ID | GI 1024336747 NG_046907 Homo sapiens | TTCTTGTTCTGGCCC |
| NO: 4009 | acetyl-CoA carboxylase beta | TCCACAGTGGTGAAG |
| | (ACACB), RefSeqGene on chromosome 12 | AAGGGAGTTTTACGT |
| | | AGCCCAGGCACTCAC |
| SEQ ID | GI 197245401 NG_008401 Homo sapiens | GTCATCAAAGACTGC |
| NO: 4010 | glial fibrillary acidic protein | ACAGCTACTGAGTGG |
| | (GFAP), RefSeqGene on chromosome 17 | CCAAGGCTTTGCTCC |
| | | CTCTCCTTGAGGACA |
| SEQ ID | GI 1025608653 NG_047027 Homo sapiens | TGTGCCATAAGTGGA |
| NO: 4011 | Jun proto-oncogene, AP-1 | TGCTCTGACAGCCAT |
| | transcription factor subunit | GATGTTCCGAGTTCC |
| | (JUN), RefSeqGene on chromosome [symbol] | TTCCCCACAGTCAGG |
| SEQ ID | GI 170932506 NG_007486 Homo sapiens | TTGCCTCTGGTCAGA |
| NO: 4012 | protein kinase AMP-activated | GGTACAGTAGCGTGA |
| | non-catalytic subunit gamma 2 | GGATTCGTAGTGTGG |
| | (PRKAG2), RefSeqGene on chr [symbol] | CTGGCGTTCTCATCA |
| SEQ ID | GI 974987490 NG_016453 Homo sapiens | CTTCTTCAGACAGCC |
| NO: 4013 | transient receptor potential | AGGCCTGCGACGACT |
| | cation channel subfamily M member 1 | GAGTATGTAGGTGTA |
| | (TRPM1), RefSeqGene or [symbol] | TGGGATGGAGTCCGT |
| SEQ ID | GI 557878734 NM_001995 Homo sapiens | TTCTTCTCCAGTCCC |
| NO: 4014 | acyl-CoA synthetase long | CTGTGGTTTCTGTTG |
| | chain family member 1 | GAGCATAAGGTTTCC |
| | (ACSL1), transcript variant 1, mRNA | AGTAAGCGGGAGGGC |
| SEQ ID | GI 197304706 NM_032350 Homo sapiens | CGGATCACGTACCTG |
| NO: 4015 | chromosome 7 open reading frame 50 | TGCAGAAACCGCCTC |
| | (C7orf50), transcript variant 1, mRNA | TGTGGCTGCATTTGA |
| | | AATAAAACCCGACCC |
| SEQ ID | GI 31343534 NM_178818 Homo sapiens | CACCAAGACACAGAC |
| NO: 4016 | CKLF like MARVEL transmembrane | ACGTACTCTTCACCG |
| | domain containing 4 | GCTCCTTTTGCTTCT |
| | (CMTM4), transcript variant 1, mRNA [symbol] | CCTTCCTGCAGGACG |
| SEQ ID | GI 115298685 NM_006099 Homo sapiens | CAGCACTATGGCCCC |
| NO: 4017 | protein inhibitor of activated STAT 3 | TCTGTCATCACCTCA |
| | (PIAS3), mRNA | CTAGATGAACAGGAT |
| | | GCCCTTGGCCACTTC |
| SEQ ID | GI 40288424 AY506357 Homo sapiens | GTGCAGTGACACGGC |
| NO: 4018 | truncated epidermal growth factor | ACAGATCCATGGAGT |
| | (beta-urogastrone) | GTGGAATGTGTGGAT |
| | (EGF) gene, complete cds | GGCACTTTGGGATTC |
| SEQ ID | GI 47777672 AY623118 Homo sapiens | CTCACTCATCCTCTT |
| NO: 4019 | hexokinase 2 | TCCTGCTCCCCCACA |
| | (HK2) gene, complete cds | GCTTTTCTGTTGCTT |
| | | CAGTGGCCTGACTCT |
| SEQ ID | GI 379991110 NG_032143 Homo sapiens | TGATGGTCAGGGGTG |
| NO: 4020 | aconitase 2 | CTGTTTCAGAATGTG |
| | (ACO2), RefSeqGene on chromosome 22 | GCCTGTTCTTACTGC |
| | | TGGGTGACTCGAACA |
| SEQ ID | GI 588480539 NG_033255 Homo sapiens | TCACAGAAACATGAA |
| NO: 4021 | ras homolog family member H | CTACCAGCCTTGGAG |
| | (RHOH), RefSeqGene on chromosome 4 | GGGCCCTGAGAGCCC |
| | | ATCTAGTTCAATGCC |
| SEQ ID | GI 299758401 NM_000143 Homo sapiens | CTGCTGGGGGATGCT |
| NO: 4022 | fumarate hydratase | TCAGTTTCCTTTACA |
| | (FH), mRNA | GAAAACTGCGTGGTG |
| | | GGAATCCAGGCCAAT |
| SEQ ID | GI 567316248 NM_022128 Homo sapiens | GGTCTGCCAGCTCGA |
| NO: 4023 | ribokinase | AATAACTCCAGCAAC |
| | (RBKS), transcript variant 1, mRNA | TTCTTTGGAAGCCCT |
| | | AACAATGGCCCGCAG |
| SEQ ID | GI 48928023 NM_003225 Homo sapiens | ACACGCTTCTGCAGC |
| NO: 4024 | trefoil factor 1 | TGTGCCTCGGCTCAC |
| | (TFF1), mRNA | AACACAGATTGACTG |
| | | CTCTGACTTTGACTA |
| SEQ ID | GI 1024846747 NG_047015 Homo sapiens | ACCTGAGAAGTGGCA |
| NO: 4025 | bone gamma-carboxyglutamate protein | GGTGGAGGACCCTTC |
| | (BGLAP), RefSeqGene on chromosome 1 | CAGTGATGCTCTCGT |
| | | TATAGGAAGACAGGG |
| SEQ ID | GI 313569850 NM_144601 Homo sapiens | AGTTCCTGCTGGCCT |
| NO: 4026 | CKLF like MARVEL transmembrane | TGTACTTCCTCTTTG |
| | domain containing 3 | CTGATGCCATGCAGC |
| | (CMTM3), transcript variant 1, mRN [symbol] | TGAATGACAAGTGGC |
| SEQ ID | GI 89142743 NM_023068 Homo sapiens | TCCCTCAAAGGAAGC |
| NO: 4027 | sialic acid binding ig like lectin 1 | CCTGCCCTTTCACAT |
| | (SIGLEC1), mRNA | CCTTCTCCTCGAAAG |
| | | TCACCCTGGACTTTG |
| SEQ ID | GI 88698227 DQ400449 Homo sapiens | CCTGAGCCTAGGCTT |
| NO: 4028 | complement component 5 | GGTGCTGGCACACCA |
| | (C5) gene, complete cds | TCACTTCCACACATT |
| | | CTTTTGTCCAAAGCA |
| SEQ ID | GI 42416963 AY534685 Homo sapiens | GGTACTGGGACATCA |
| NO: 4029 | insulin-like growth factor | AGACATGACTGGGAA |
| | binding protein 5 | GAGGGGGTGAGAGTC |
| | (IGFBP5) gene, complete cds | CAGAAGGGGTACCAG |
| SEQ ID | GI 226509828 NG_011801 Homo sapiens | GTGTTTTTAAGCATA |
| NO: 4030 | carnitine palmitoyltransferase 1A | AGGCCACTGATCCAG |
| | (CPT1A), RefSeqGene on chromosome 11 | GCCAGAACCCAGGGT |
| | | GGGATTTGCGCTCAT |
| SEQ ID | GI 189339243 NG_007969 Homo sapiens | AAGAGCTGGGAGTAT |
| NO: 4031 | cytochrome P450 family 7 | TGGAATCCAGGTTGC |
| | subfamily A member 1 | TCCAACTCCACAGCC |
| | (CYP7A1), RefSeqGene on chromosome 8 | AGCACTCTTCCCTTT |
| SEQ ID | GI 514825583 NG_033271 Homo sapiens | CACATTGCCGCACCT |
| NO: 4032 | Kruppel like factor 10 | TTCAAAGAGGAAGAA |
| | (KLF10), RefSeqGene on chromosome 8 | AAGAGCCCAGTATCT |
| | | GCCCCCAAACTCCCC |
| SEQ ID | GI 806904734 NG_008957 Homo sapiens | GACGTTCCAGCGGTA |
| NO: 4033 | monoamine oxidase A | GAAATCACCCACACC |
| | (MAOA), RefSeqGene on chromosome X | TTCTGGGAAAGGAAC |
| | | CTGCCCTCTGTTTCT |
| SEQ ID | GI 343403834 NG_029695 Homo sapiens | ACACTGTCTGTGGGT |
| NO: 4034 | prefoldin subunit 5 | GCTGTGCCCTGTTGG |
| | (PFDN5), RefSeqGene on chromosome 12 | AACTCTCTTTAACGT |
| | | CTTACGTTGGAGCCG |
| SEQ ID | GI 156104863 NM_003501 Homo sapiens | CTCAGTGTCGAAGAC |
| NO: 4035 | acyl-CoA oxidase 3, pristanoyl | ATGTTCAAGAGCCCT |
| | (ACOX3), transcript variant 1, mRNA | CTGAAGGTCCCCGCC |
| | | TTGATTCAGTGCCTG |
| SEQ ID | GI 61743979 NM_017564 Homo sapiens | CTTACCAAACCTGCT |
| NO: 4036 | stabilin 2 | CATGCGGCTGGAACA |
| | (STAB2), mRNA | GATGCCTGACTATTC |
| | | CATCTTCCGGGGCTA |
| SEQ ID | GI 149192859 NM_012192 Homo sapiens | CAAAAAACCACAGGG |
| NO: 4037 | translocase of inner | CTTTTGGGCACTGCC |
| | mitochondrial membrane 10B | TCCTTGGGAAGTTAG |
| | (TIMM10B), mRNA | TGGCCACAGAAGAGA |
| SEQ ID | GI 116805346 NM_014607 Homo sapiens | AATGGTGACAGTGTT |
| NO: 4038 | UBX domain protein 4 | GGCAAGGAAACAGCA |
| | (UBXN4), mRNA | ACACAGGCTGCGCTG |
| | | TTGGTAGGAGTGAAA |
| SEQ ID | GI 163954975 NG_007078 Homo sapiens | ACTCAGCATAGGGGC |
| NO: 4039 | electron transfer | TGAGTGCCAAGGTAA |
| | flavoprotein dehydrogenase | GACTTCCCCCTCACC |
| | (ETFDH), RefSeqGene on chromosome 4 | CTCTGAAGGTTCATA |
| SEQ ID | GI 224809340 NG_011507 Homo sapiens | AGACACCTCACACTG |
| NO: 4040 | glutamate ionotropic receptor | AAAAGTCTGAAAGCA |
| | NMDAtype subunit 1 | GCGGTCAAACGCTAA |
| | (GRIN1), RefSeqGene on chromosome | TGGCCAAAAGGCCCC |
| SEQ ID | GI 260763977 NG_013058 Homo sapiens | CTCAGCTTCACTGGT |
| NO: 4041 | 5-hydroxytryptamine receptor 3A | TTTGTTGCATGAGTT |
| | (HTR3A), RefSeqGene on chromosome 11 | CGTTCTCTGGGCCTG |
| | | CGGTTCCCCAAGTTC |
| SEQ ID | GI 225007613 NG_011612 Homo sapiens | CAGTCATGCAGAGTA |
| NO: 4042 | upstream transcription factor 1 | GCAATGCTGGGAGTG |
| | (USF1), RefSeqGene on chromosome 1 | CTGGGCCCCTGCTAT |
| | | ATCAATGCTAGGAGG |
| SEQ ID | GI 148227403 NM_005292 Homo sapiens | GAGACAAAGCAGCAA |
| NO: 4043 | G protein-coupled receptor 18 | TTAAAGTCAGCCCAG |
| | (GPR18), transcript variant 1, mRNA | CACCAACTCCGACGC |
| | | CAAGCGTTACACTGG |
| SEQ ID | GI 930697465 NM_005564 Homo sapiens | GGTCCCTCTGCAGCA |
| NO: 4044 | lipocalin 2 | GAACTTCCAGGACAA |
| | (LCN2), mRNA | CCAATTCCAGGGGAA |
| | | GTGGTATGTGGTAGG |
| SEQ ID | GI 542029075 NM_006440 Homo sapiens | ATCACGCCCATTATA |
| NO: 4045 | thioredoxin reductase 2 | AACCACTGGAGTTCA |
| | (TXNRD2), transcript variant 1, mRNA | CGGTGGCTGGACGAG |
| | | ATGCATCCCAGTGTT |
| SEQ ID | GI 31096355 AY300794 Homo sapiens | GGAAGTTCCCCAAAC |
| NO: 4046 | PRKC, apoptosis, WT1, regulator | TCAGAGTAGGACACG |
| | (PAWR) gene, complete cds | TGCTTTTCAGGCTTC |
| | | CTGGCCAGGTCTCAG |
| SEQ ID | GI 306482660 NG_027673 Homo sapiens | AGACACACGAGCTTG |
| NO: 4047 | activating transcription factor 1 | TTTCTGCCTCAGGAT |
| | (ATF1), RefSeqGene on chromosome 12 | CTCTGGAGTTGTCAT |
| | | TGCTCATGCCTGGCA |
| SEQ ID | GI 429535869 NG_033019 Homo sapiens | CCAGTTTGGAGGAAG |
| NO: 4048 | interleukin 5 | GGTCTGAGCACATGT |
| | (IL5), RefSeqGene on chromosome 5 | GGCTGAGCATCCCCA |
| | | TTTCTCTGGAGAAGT |
| SEQ ID | GI 338968872 NG_029246 Homo sapiens | TGTGTGCTCCTTGAG |
| NO: 4049 | RAR related orphan receptor A | GTCAGAGATGTGTCT |
| | (RORA), RefSeqGene on chromosome 15 | TGTGCATCATCAGGG |
| | | ACCCTGGTGCAACAA |
| SEQ ID | GI 386781923 NM_002371 Homo sapiens | TCGGTCTTCACCACC |
| NO: 4050 | mal, T-cell differentiation protein | TTGCCCGACTTGCTC |
| | (MAL), transcript variant a, mRNA | TTCATCTTTGAGTTT |
| | | ATCTTCGGGGGCCTG |
| SEQ ID | GI 384551644 NM_005428 Homo sapiens | GCGCAGGGGAGACTC |
| NO: 4051 | vav guanine nucleotide exchange factor 1 | CTATGACCTCAAGGA |
| | (VAV1), transcript variant 1, mRNA | CTTTGTAAACCTGCA |
| | | CAGCTTCCAGGTTCG |
| SEQ ID | GI 71648775 DQ143945 Homo sapiens | GCGAATCGGGTCTGC |
| NO: 4052 | adrenomedullin | TTGTGTTTTCCAGGT |
| | (ADM) gene, complete cds | GGAATAAGTGGGCTC |
| | | TGAGTCGTGGGAAGA |
| SEQ ID | GI 238018116 NG_012218 Homo sapiens | CAACACTACAGAGCT |
| NO: 4053 | hexose-6-phosphate dehydrogenase/ | GGGGGATCTCAGCCA |
| | glucose 1-dehydrogenase | TTGTTTTCCCAGTGG |
| | (H6PD), RefSeqGene on chro [symbol] | AGACCACTCTTGGCA |
| SEQ ID | GI 296841050 NM_138733 Homo sapiens | AGAACGCTCAGGTTG |
| NO: 4054 | phosphoglycerate kinase 2 | GAAAAGCCACTGTAG |
| | (PGK2), mRNA | CATCTGGCATATCTC |
| | | CTGGCTGGATGGGTT |
| SEQ ID | GI 24756896 L47234 Homo sapiens | CTGAACTGCACAGGT |
| NO: 4055 | ERCC2 | GGCTGTGTGTTTCTG |
| | (ERCC2) and kinesin light chain | GACTCTCCATTCTGT |
| | (KLC2) genes, complete cds, | CCCAGTGGTCTGTCC |
| | complete sequence | |
| SEQ ID | GI 1036030212 AH006319 Homo sapiens | TGTGTCTGGGGCCAG |
| NO: 4056 | succinate dehydrogenase subunit C | CACTGATCCACACAG |
| | (SDHC) gene, complete cds | CTAAGTTTGCACTTG |
| | | TCTTCCCTCTCATGT |
| SEQ ID | GI 237874185 NG_012167 Homo sapiens | GGCATCGGTAAACAG |
| NO: 4057 | CD209 molecule | TCATGGCACTGGAGG |
| | (CD209), RefSeqGene on chromosome 19 | GAGTATCTTATGCCC |
| | | ACGAGCAATGAGGCA |
| SEQ ID | GI 225579058 NM_197965 Homo sapiens | AATAGCAGGGACTAG |
| NO: 4058 | solute carrier family 10 member 6 | CTGGCTGGACTGGCC |
| | (SLC10A6), mRNA | CCCTTCTTTTTCAGT |
| | | GGCCAGTAAAGACAG |
| SEQ ID | GI 227499618 NM_003645 Homo sapiens | AAACACCGCAAAATG |
| NO: 4059 | solute carrier family 27 member 2 | ACCCTGGTGGAGGAG |
| | (SLC27A2), transcript variant 1, mRNA | GGCTTTAACCCTGCT |
| | | GTCATCAAAGATGCC |
| SEQ ID | GI 24371240 NM_024630 Homo sapiens | GCCCGGAGGAAATGG |
| NO: 4060 | zinc finger DHHC-type containing 14 | GAGGTGTTCCCGGGA |
| | (ZDHHC14), transcript variant 1, mRNA | AGAAACAAGTTCTTC |
| | | TGTAACGGGAGGATC |
| SEQ ID | GI 1049010774 AH002843 Homo sapiens | CTGACCACTATGCCC |
| NO: 4061 | interleukin 2 receptor gamma chain | ACTGACTCCCTCAGT |
| | (IL2RG) gene, complete cds | GTTTCCACTCTACCC |
| | | CTCCCAGAGGTTCAG |
| SEQ ID | GI 189217849 NG_007932 Homo sapiens | GGTGTCAGACTGCAG |
| NO: 4062 | cytochrome P450 family 4 | GAAAGGAGCTCACTC |
| | subfamily A member 11 | TGCTGGGGTGGATAT |
| | (CYP4A11), RefSeqGene on chromosome [symbol] | CTGAGGCAGAGATCT |
| SEQ ID | GI 344217739 NG_029805 Homo sapiens | CTCGTTCTGTTCCTG |
| NO: 4063 | DnaJ heat shock protein family | GGGGTGCTTGCTTGT |
| | (Hsp40) member C5 | TCTAGGCCCCCTTTG |
| | (DNAJC5), RefSeqGene on chromosome | TATGGAGAGGTTCAA |
| SEQ ID | GI 161086967 NG_007121 Homo sapiens | CCTCCCCTATTCCAC |
| NO: 4064 | hydroxyacyl-CoA dehydrog | TCCACCTTCACTGGG |
| | enase/ | TTCTCCAGTCAGTAG |
| | 3-ketoacyl-CoA thiolase/ | TTCCCATGTGCCTCT |
| | enoyl-CoA hydratase | |
| | (trifunctiona [symbol] | |
| SEQ ID | GI 164695818 AK315628 Homo sapiens | AGTGGACAGTTGGAG |
| NO: 4065 | cDNA, FU96713, Homo sapiens | GCCTTGAGGTTCTTA |
| | ankyrin repeat and SOCS | GCCAAGTACGGTGCT |
| | box-containing 2 | GACATCAACACGCAG |
| | (ASB2), mRNA | |
| SEQ ID | GI 157427676 NM_004911 Homo sapiens | CACCATCAAGATCCT |
| NO: 4066 | protein disulfide isomerase | TAAGAAGGGGCAGGC |
| | family A member 4 | TGTAGACTACGAGGG |
| | (PDIA4), mRNA | CTCCAGAACCCAGGA |
| SEQ ID | GI 149274622 NM_032579 Homo sapiens | GCCTCCTTCTCATCC |
| NO: 4067 | resistin like beta | TAATCCCCCTTCTCC |
| | (RETNLB), mRNA | AGCTGATCAACCCGG |
| | | GGAGTACTCAGTGTT |
| SEQ ID | GI 163644319 NM_032873 Homo sapiens | CGGAGGTCCTCAAGA |
| NO: 4068 | ubiquitin associated and | AGTTTGCTGCTGACT |
| | SH3 domain containing B | TTGCTGCAGAGGCTG |
| | (UBASH3B), mRNA | CATCCAAAACCGAAG |
| SEQ ID | GI 52854080 AY764389 Homo sapiens | GGGCCTTTGCAGGTG |
| NO: 4069 | baculoviral lAP repeat-containing 3 | CCAAATAAATTTCAG |
| | (BIRC3) gene, complete cds | GACAGAGCCTAAGGC |
| | | AGAGCTCTGGCACAG |
| SEQ ID | GI 4572463 AF123653 Homo sapiens | CCCCTGAAGCAGAAG |
| NO: 4070 | FEZI | TCTTGGGTCAGGCCA |
| | (FEZl) gene, complete cds | TAAGCAAAGAGCACA |
| | | GGGGATATGTGAGCT |
| SEQ ID | GI 297747369 NG_021416 Homo sapiens | GGAAGGATGAGGACT |
| NO: 4071 | growth hormone releasing | CCAAACAGCCAGCTC |
| | hormone receptor | CCATGCCAAATAGAA |
| | (GHRHR), RefSeqGene on chromosome 7 | CGATGAGTGCTGGGA |
| SEQ ID | GI 344925847 NG_029819 Homo sapiens | GCAGATTGACAGCCC |
| NO: 4072 | prolactin | ACAGGTGTACGCGAT |
| | (PRL), RefSeqGene on chromosome 6 | GTGACAAGACGACGT |
| | | GCAAAGACCACAGTA |
| SEQ ID | GI 315434201 NM_020429 Homo sapiens | TGCAGCCAGGTTTAG |
| NO: 4073 | SMAD specific E3 | CCTTTGGCTTTGGTC |
| | ubiquitin protein ligase 1 | ACACAGGATATTCTG |
| | (SMURF1), transcript variant 1, mRNA | CTGTGTTGCAACCCA |
| SEQ ID | GI 1028630732 NG_050570 Homo sapiens | TCCGCCTGACTGAGC |
| NO: 4074 | carnitine palmitoyltransferase 1C | TGGGAACCATTGCTT |
| | (CPT1C), RefSeqGene on chromosome 19 | CCTTGCTGTGTGACC |
| | | TTCTGCACGTTATTA |
| SEQ ID | GI 10798850 AF084559 Homo sapiens | ATGGCAGCCCATCGA |
| NO: 4075 | fatty acid desaturase 2 | GTACGGCAAGAAGAA |
| | (FADS2) mRNA, complete cds | GCTGAAATACCTGCC |
| | | CTACAATCACCAGCA |
| SEQ ID | GI 156104861 NM_181712 Homo sapiens | GGCTACACTGCCGTA |
| NO: 4076 | KN motif and ankyrin repeat domains 4 | ATGATCACTCCCTTG |
| | (KANK4), transcript variant 1, mRNA | GCTTCCGCAGAGACC |
| | | AATGAAGACATGGCT |
| SEQ ID | GI 214010161 NG_009030 Homo sapiens | TGAGATCACACATTG |
| NO: 4077 | GLI family zinc finger 2 | AGTTGATGGCAAAAG |
| | (GLI2), RefSeqGene on chromosome 2 | CAGAAGCCTAGGCCT |
| | | CCCGCCTGCAAATGC |
| SEQ ID | GI 237858740 NG_012111 Homo sapiens | CCTCATCTGTAAAGT |
| NO: 4078 | platelet derived growth | GTGGGTAACAGCATC |
| | factor subunit B | TGCCGGTAACAGCAC |
| | (PDGFB), RefSeqGene on chromosome 22 | CTGCCGTGAAGGGAA |
| SEQ ID | GI 195927007 NM_052813 Homo sapiens | ACTACGTAAGGACTC |
| NO: 4079 | caspase recruitmen | CAAGATGTACAAGGA |
| | t domain family member 9 | CCGCATCGAGGCCAT |
| | (CARD9), transcript variant 1, mRNA | CCTGCTGCAGATGGA |
| SEQ ID | GI 815890844 NM_001836 Homo sapiens | GACTCATGGATCCCC |
| NO: 4080 | chymase 1 | AGGCCTGCAGCCACT |
| | (CMAl), transcript variant 1, mRNA | TCAGAGACTTTGACC |
| | | ACAATCTTCAGCTGT |
| SEQ ID | GI 194018737 NG_008190 Homo sapiens | CAGACTTCCAGCATG |
| NO: 4081 | acyl-CoA oxidase 1 | AGGACTTGAACTTCC |
| | (ACOX1), RefSeqGene on chromosome 17 | TCACTCGCAGCCAGC |
| | | GTTATGAGGTGGCTG |
| SEQ ID | GI 533112518 NG_007159 Homo sapiens | TGGGCAGGGGACAGG |
| NO: 4082 | chloride voltage-gated channel 5 | CCACACAGGGTTTTA |
| | (CLCN5), RefSeqGene on chromosome X | TAGGCCATGTTACCA |
| | | AGTACCCTAACTTGG |
| SEQ ID | GI 284813593 NG_016440 Homo sapiens | CTGCCAGCACTTTCT |
| NO: 4083 | MAF bZIP transcription factor | TCGGCCCCTTTCCTA |
| | (MAF), RefSeqGene on chromosome 16 | TAGGGTCGGGTTCTC |
| | | CCACTTCAGTCAAAC |
| SEQ ID | GI 22538815 NM_005623 Homo sapiens | GAGGTCACTTTGCTG |
| NO: 4084 | C-C motif chemokine ligand 8 | AGCACAATCCCATAC |
| | (CCL8), mRNA | CCTTCAGCCTCTGCT |
| | | CCACAGAGCCTAAGC |
| SEQ ID | GI 593023777 KJ145927 Homo sapiens | TTACTCGCTGGCCTG |
| NO: 4085 | lamin A/C | GCCTTTCTTCTCTCT |
| | (LMNA) gene, complete cds | CCTCCCTATACCTTG |
| | | AACAGGGAACCCAGG |
| SEQ ID | GI 575006674 NG_009015 Homo sapiens | CTTCCTGTGCCCTGA |
| NO: 4086 | glucose-6-phosphate dehydrogenase | ATGGGGAGTGGCACC |
| | (G6PD), RefSeqGene on chromosome X | TCTTGAGTTTTCAGA |
| | | GGGAGGAAGTATGCC |
| SEQ ID | GI 2789671 AF040714 Homo sapiens | TATGGAGGAACTGCT |
| NO: 4087 | homeobox protein A10 | TGCTCTCAGCAAGCC |
| | (HOXA10) gene, complete cds | AAAAACGGGGGCACG |
| | | ACTCTCTTCTCTGTG |
| SEQ ID | GI 224451013 NG_009888 Homo sapiens | ATCCCATCAGCTCTG |
| NO: 4088 | acetyl-CoA acetyltransferase 1 | GCCAGAGGCAGGGGA |
| | (ACAT1), RefSeqGene on chromosome 11 | GTCACCTTGTAAGTA |
| | | CTTAGGGTTGTCCTT |
| SEQ ID | GI 227908850 NG_011958 Homo sapiens | TTTCGGAGGGGTCCG |
| NO: 4089 | noggin | AATCTGGGTGAAAAT |
| | (NOG), RefSeqGene on chromosome 17 | CACCACCTCTGGCAT |
| | | CTGCTTTTGGGAAGA |
| SEQ ID | GI 346227162 NG_029971 Homo sapiens | CAGACACACCCTCAG |
| NO: 4090 | RELA proto-oncogene, NF-kB subunit | TGACCACAGCCTTCC |
| | (RELA), RefSeqGene on chromosome 11 | ACACTAGTCCACAAC |
| | | CAGGAAAAAGTGGCA |
| SEQ ID | GI 197304706 NM_032350 Homo sapiens | CTCCTGCTGCACATG |
| NO: 4091 | chromosome 7 open reading frame 50 | TATGACAGTGACAAG |
| | (C7orf50), transcript variant 1, mRNA | GTTCCCGATGAGCAC |
| | | TTCTCCACCCTGCTG |
| SEQ ID | GI 242247668 NM_032962 Homo sapiens | TCTTCCTCCTCATCA |
| NO: 4092 | C-C motif chemokine ligand 14 | CCATCGCCCTAGGGA |
| | (CCL14), transcript variant 2, mRNA | CCAAGACTGAATCCT |
| | | CCTCACAAACTGGGG |
| SEQ ID | GI 242247668 NM_032962 Homo sapiens | CCGCGTCAGCGGATT |
| NO: 4093 | C-C motif chemokine ligand 14 | ATGGATTACTATGAG |
| | (CCL14), transcript variant 2, mRNA | ACCAACAGCCAGTGC |
| | | TCCAAGCCCGGAATT |
| SEQ ID | GI 658309997 NM_000853 Homo sapiens | TTGCACCGTCCTCAG |
| NO: 4094 | glutathione S-transferase theta l | CAGTCCACAAAGCAT |
| | (GSTT1), transcript variant 1, mRNA | TTTCATTTCTAATGG |
| | | CCCATGGGAGCCAGG |
| SEQ ID | GI 270309111 NG_016167 Homo sapiens | ACAGGCAGGGAGATG |
| NO: 4095 | glycogen synthase 2 | CAGGTCATGCAGGTC |
| | (GYS2), RefSeqGene on chromosome 12 | AATATACCCATGAGG |
| | | AGAGAGCAGGAAGGA |
| SEQ ID | GI 209870107 NG_008768 Homo sapiens | GGAGGGAAAGCAACC |
| NO: 4096 | propionyl-CoA carboxylase alpha subunit | TGAAGGATCCATCTG |
| | (PCCA), RefSeqGene on chromosome 13 | CTCCCTTCTGCTACA |
| | | CTGCCTCGATGCAAG |
| SEQ ID | GI 1018191682 NG_012337 Homo sapiens | GGACCCATTCCTTGC |
| NO: 4097 | succinate dehydrogenase complex subunit D | CAGTTTGGGGGGTCT |
| | (SDHD), RefSeqGene on chromosome 11 | TTAGCGGTTGGGAAG |
| | | TAGCTCTCAAACTCT |
| SEQ ID | ref\|NG_021140.1\| Homo sapiens | ATGCCCAAAGAGGAG |
| NO: 4098 | adiponectin, CIQand collagen domain containing | AGAGGAAGCTCTCTT |
| | | TCCCAGATGCCCCAG |
| | | CAAGTGTAACCTTGC |
| SEQ ID | GI 190358530 NG 008050 Homo sapiens | TACCAGGTAGCTGGG |
| NO: 4099 | endothelin 3 | GCCTGTAGGAGTCAG |
| | (EDN3), RefSeqGene on chromosome 20 | GGTTCTCTAGAGAGA |
| | | CAGAACCAACAGGGT |
| SEQ ID | GI 341823675 NG_029547 Homo sapiens | CCCTCACATCACTCA |
| NO: 4100 | interleukin 5 receptor subunit alpha | GAGAGACTTACAGGA |
| | (IL5RA), RefSeqGene on chromosome 3 [symbol] | GCAGCATGAGCCTTC |
| | | CTGGGGAGAGGGAAC |
| SEQ ID | GI 224809246 NG_011451 Homo sapiens | GAAGGCAGGCACGGT |
| NO: 4101 | integrin subunit alpha X | CTCACAGCTAACATT |
| | (ITGAX), RefSeqGene on chromosome 16 | TACAGAGCAGTAAGT |
| | | GCAGTGCCAGGCTCA |
| SEQ ID | GI 224809344 NG_011510 Homo sapiens | GTCCTGCTATTGGTC |
| NO: 4102 | lanosterol synthase | TAGGGGATCAGCTAG |
| | (LSS), RefSeqGene on chromosome 21 [symbol] | CCTTGCCAGTGTAGG |
| | | GTGACAGGCTCTCTG |
| SEQ ID | GI 181979 M29366 Human | TGGCTCGGGTGTCTT |
| NO: 4103 | epidermal growth factor receptor | TGGAACTGTGCACAA |
| | (ERBB3) mRNA, complete cds [symbol] | AGGAGTGTGGATCCC |
| | | TGAGGGTGAATCAAT |
| SEQ ID | GI 189458808 NG_007982 Homo sapiens | CCACAGCAGGGATGG |
| NO: 4104 | cytochrome P450 family 19 | GAACTATAGGGTGGA |
| | subfamily A member 1 | CAAGGCATTTGCCCT |
| | (CYP19A1), RefSeqGene on chromosome [symbol] | GAAGGTAGTCCACAC |
| SEQ ID | GI 345478701 NG_029901 Homo sapiens | TTGTCACCAGCCAGC |
| NO: 4105 | peroxiredoxin 2 | CTGGGTTCAAATGCC |
| | (PRDX2), RefSeqGene on chromosome 19 [symbol] | GTTTAAGAGCTGTGA |
| | | TCGTCTCTGGGTCTC |
| SEQ ID | GI 62530382 NM_004281 Homo sapiens | GTAAGCCAGGCCCAG |
| NO: 4106 | BCL2 associated athanogene 3 | TTGGACCAGAACTCC |
| | (BAG3), mRNA [symbol] | CTCCTGGACACATCC |
| | | CAATTCAAGTGATCC |
| SEQ ID | GI 157427676 NM_004911 Homo sapiens | TTACAGAGCTGCAAC |
| NO: 4107 | protein disulfide isomerase | TCAGTTTTGGCGGAG |
| | family A member 4 | CAAAGTCCTAGAGGT |
| | (PDIA4), mRNA [symbol] | GGCCAAGGACTTCCC |
| SEQ ID | GI 544583587 NM_004683 Homo sapiens | CTGGTCTGGGGGTCA |
| NO: 4108 | regucalcin | AAGGAATTGCTCCCT |
| | (RGN), transcript variant 1, mRNA [symbol] | ACTCCTATGCGGGAT |
| | | GAGGACAGGTCTTCT |
| SEQ ID | GI 37499464 AY422952 Homo sapiens | TGTGGCTTTGCCTGG |
| NO: 4109 | apolipoprotein A-1 | TCCGCTGTGACTTCC |
| | (APOA1) gene, complete cds [symbol] | TTTCTACTTGAGCCT |
| | | TGCTAAGGCAGACTC |
| SEQ ID | GI 117606579 EF064764 Homo sapiens | AGTGAAGGAATCCTG |
| NO: 4110 | chemokine | GGTAGAGACCATTCT |
| | (C-C motif) ligand 22 | CAGGTGGTTGGGCCA |
| | (CCL22) gene, complete cds [symbol] | GGCTAAAGACTGGGA |
| SEQ ID | GI 50234968 AY665769 Homo sapiens | TGGTCAGAACCTAGG |
| NO: 4111 | chemokine-like factor | AGGCAGTGGCTTGAG |
| | (CKLF) gene, complete cds [symbol] | ACTCTGGGTGGAAAA |
| | | GGAGACTGTGAGAGC |
| SEQ ID | GI 13430063 AF253322 Homo sapiens | CAGAGCTCTCTGAGT |
| NO: 4112 | cytochrome P450 | GACTAAAGCCTGGTA |
| | (CYP1A1) and cytochrome P450 | CTTGCAGGCCCCAAG |
| | (CYP1A2) genes, complete cds [symbol] | AAGACCTACCCAGGT |
| SEQ ID | GI 57864635 AY882422 Homo sapiens | CCATAGCTTTAGGGC |
| NO: 4113 | flavin containing monooxygenase 4 | TTTGCCAGAACTATG |
| | (FMO4) gene, complete cds | ACGTTGAGGAGGGTG |
| | | GGGTAAAGGGGCAGG |
| SEQ ID | GI 82583657 DQ297142 Homo sapiens | GCAGGTGGAGGCACA |
| NO: 4114 | peroxiredoxin 1 | GTGATGGGAAAGGTC |
| | (PRDX1) gene, complete cds | AACGTGACTTTTGGG |
| | | GAGCCAAACAAAAGT |
| SEQ ID | GI 237820648 NG_012041 Homo sapiens | CCTGTGCCAGGTTTT |
| NO: 4115 | adenosine monophosphate deaminase 3 | GAGGTTGGGCAAGGG |
| | (AMPD3), RefSeqGene on chromosome 11 | AAAGAGCATTCAGTT |
| | | GTGCTTGGAGGAACA |
| SEQ ID | GI 588282795 NM_002168 Homo sapiens | TTTTGCGCACAGCTG |
| NO: 4116 | isocitrate dehydrogenase | CTTCCAGTATGCCAT |
| | (NADP(+)) 2, mitochondrial | CCAGAAGAAATGGCC |
| | (IDH2), transcript variant 1, mRNA | GCTGTACATGAGCAC |
| SEQ ID | GI 117606358 NM_206909 Homo sapiens | TGCGATGGGCTCTTC |
| NO: 4117 | pleckstrin and Sec7 domain containing 3 | TTGGTGTCTGTATGG |
| | (PSD3), transcript variant 2, mRNA | TTGCTGCAATGCTGG |
| | | GGTGAAAACAACACG |
| SEQ ID | GI 85725379 DQ370420 Homo sapiens | GATGTTCAGTCAAAG |
| NO: 4118 | metallothionein 2A | AGGAGGATGAGTGCC |
| | (MT2A) gene, complete cds | TTGGCCCAGGAATCA |
| | | GGAGCACACTTGCCT |
| SEQ ID | GI 269308199 NG_015892 Homo sapiens | CTGGTGCCTTTGCTC |
| NO: 4119 | bassoon presynaptic cytomatrix protein | CAGCCACTTGGAAGA |
| | (BSN), RefSeqGene on chromosome 3 [symbol] | GATTAGAGTCCCCAA |
| | | ACCCCACAGAGTCAC |
| SEQ ID | GI 209529670 NG_008721 Homo sapiens | AGTCCCTTCCCCAAA |
| NO: 4120 | LIF, interleukin 6 family cytokine | GTCACTCAGCTCATA |
| | (LIF), RefSeqGene on chromosome 22 [symbol] | ACTGGCAGAGCCAAA |
| | | CCTCCAACCTGGTTG |
| SEQ ID | GI 336455046 NG_029166 Homo sapiens | TTGGGGTCTGCTCTA |
| NO: 4121 | SRY-box 4 | AGCTGCAGCAAGAGA |
| | (SOX4), RefSeqGene on chromosome 6 [symbol] | AACTGTGTGTGAGGG |
| | | GAAGAGGCCTGTTTC |
| SEQ ID | GI 4826562 Y17151 Homo sapiens | ACATGCTGCCCCAGT |
| NO: 4122 | mRNA for multidrug resistance protein 3 | TAATCAGCAACCTGA |
| | (ABCC3) [symbol] | CTCAGGCCAGTGTGT |
| | | CTCTGAAACGGATCC |
| SEQ ID | GI 658309997 NM_000853 Homo sapiens | CAGAGTTGGATGTGA |
| NO: 4123 | glutathione S-transferase theta l | CCCTGCAGTTGCTCG |
| | (GSTT1), transcript variant 1, mRNA [symbol] | AGGACAAGTTCCTCC |
| | | AGAACAAGGCCTTCC |
| SEQ ID | GI 82734235 NM_006084 Homo sapiens | GGATCAGAGGTCCCT |
| NO: 4124 | interferon regulatory factor 9 | GGAGTTTCTGCTTCC |
| | (IRF9), mRNA [symbol] | TCCAGAGCCAGACTA |
| | | CTCACTGCTGCTCAC |
| SEQ ID | GI 393662586 NM_002754 Homo sapiens | TGGCCTGGCATTCAA |
| NO: 4125 | mitogen-activated protein kinase 13 | AACCCCTTGTGTTCT |
| | (MAPK13), transcript variant 1, mRNA [symbol] | CTCTAATCTCATCAG |
| | | CTCCCACTGCCTCCC |
| SEQ ID | GI 117606585 EF064767 Homo sapiens | TGAATGAAAGGAGAA |
| NO: 4126 | chemokine | ATGGGAGGGCAGCAT |
| | (C-C motif) ligand 17 | GCGAGGGTGTTGAAG |
| | (CCL17) gene, complete cds [symbol] | TCAAGGGGAGGTCTT |
| SEQ ID | GI 57790271 AY878121 Homo sapiens | GGTGAGAGCTTTGAG |
| NO: 4127 | glutathione S-transferase A4 | CCACACCAGCAATGT |
| | (GSTA4) gene, complete cds [symbol] | GATACTGGGTGAGAG |
| | | CTCTGGTTCACGTGG |
| SEQ ID | GI 20303097 AF503166 Homo sapiens | GTCCCTGCTGCAGAC |
| NO: 4128 | xeroderma pigmentosum, complementation group A | ATTGGGAGCCATCAT |
| | (XPA) gene, complete cds [symbol] | GATTGGCTTGTTGCT |
| | | GAGCAGAATCCTTGG |
| SEQ ID | GI 564730481 NM_001287262 Homo sapiens | GAGTCACAGGGTCAC |
| NO: 4129 | butyrophilin like 10 | CACCTTTGACAACAG |
| | (BTNL10), mRNA [symbol] | GACATACTGCTGCCG |
| | | CTTCAAGGATGGTGT |
| SEQ ID | GI 27477078 NM_013278 Homo sapiens | GGGTAGAAGGAGCTC |
| NO: 4130 | interleukin 17C | AGCACCTCTTCCAGC |
| | (IL17C), mRNA [symbol] | CCTTAAAGCTGCAGA |
| | | AAAGGTGTCACACGG |
| SEQ ID | GI 10280531 AB038161 Homo sapiens | GATTTCCAAGAGCAG |
| NO: 4131 | ABCG1 gene for ABC transporter | CTTGCAGCCTTGCTC |
| | (ATP-binding cassette, sub-family G | ACAGGAAGGCACCAC |
| | (WHITE), member 1), com [symbol] | GTTGATGCAGAGTTT |
| SEQ ID | GI 699969198 NG_041780 Homo sapiens | CAATTCCTCCGGTAC |
| NO: 4132 | NLR family CARD domain containing 4 | ACCAAGGCAAGAACC |
| | (NLRC4), RefSeqGene on chromosome 2 [symbol] | CCGGAATACAGAAAG |
| | | CCCTCTGTCCTTGCA |
| SEQ ID | GI 654825134 NG_008781 Homo sapiens | GCCACTCCACGACCT |
| NO: 4133 | poliovirus receptor | TACTTTGCTGGCATG |
| | (PVR), RefSeqGene on chromosome 19 [symbol] | AGTGCTGGACAGCAA |
| | | TTTGGCAACATCCTC |
| SEQ ID | GI 2660728 AFO31523 Homo sapiens | ATGTTCCAGATCCCA |
| NO: 4134 | bcl-xL/bcl-2 associated death promoter | GAGTTTGAGCCGAGT |
| | (BAD) mRNA, complete cds [symbol] | GAGCAGGAAGACTCC |
| | | AGCTCTGCAGAGAGG |
| SEQ ID | GI 32479526 NM_000218 Homo sapiens | CACCCTGTACATCGG |
| NO: 4135 | potassium voltage-gated | CTTCCTGGGCCTCAT |
| | channel subfamily Q member 1 | CTTCTCCTCGTACTT |
| | (KCNQ1), transcript variant 1, | TGTGTACCTGGCTGA |
| | mRNA [symbol] | |
| SEQ ID | GI 1006833939 NM_003978 Homo sapiens | GCACAGCAACCAGCT |
| NO: 4136 | proline-serine-threonine | CTCCATGCAGTGTGT |
| | phosphatase interacting protein 1 | CAAGGATGATGAGCT |
| | (PSTPIP1), transcript variant 1, [symbol] | CTACGAGGAAGTGCG |
| SEQ ID | GI 269954706 NG_015999 Homo sapiens | GCCCAAACCCTGCTG |
| NO: 4137 | enoyl-CoA hydratase and | CCATCCTGGTTGTCC |
| | 3-hydroxyacyl CoA dehydrogenase | TCATCGTCTCTATGG |
| | (EHHADH), RefSeqGene on chro [symbol] | ACAATCATTCCCTCC |
| SEQ ID | GI 342307072 NG_029607Homo sapiens | CTTATGACTCAAAGG |
| NO: 4138 | heat shock transcription factor 2 | CCCTGAAGGGTTTCT |
| | (HSF2), RefSeqGene on chromosome 6 [symbol] | GTAGCCTCCCAGCCA |
| | | CAGCCCAGAAACCAT |
| SEQ ID | GI 748585188 NM_004040 Homo sapiens | ATGTTCGCCCTTCAC |
| NO: 4139 | ras homolog family member B | CAGCGGGAGCTTGAT |
| | (RHOB), mRNA [symbol] | ATCCCTTGTCTGTAA |
| | | CATAGACCCCGGGTA |
| SEQ ID | GI 340805891 NG_029487Homo sapiens | TGGGGTAGGAAGTCT |
| NO: 4140 | BCL2 related protein A1 | TCCATGACTGTGCAG |
| | (BCL2A1), RefSeqGene on chromosome 15 [symbol] | TCGAAGGAAGTTTCA |
| | | GCAAAGCCCATGGGG |
| SEQ ID | GI 223972691 NG 009823Homo sapiens | TCCACACACACCACA |
| NO: 4141 | crystallin alpha A | GACACACACACACCC |
| | (CRYAA), RefSeqGene on chromosome 21 [symbol] | CTCAACACACCATGC |
| | | CCTTTGTCTCTCTTT |
| SEQ ID | GI 1016841222 NG_008723 Homo sapiens | AGTTGGGGTCCATGC |
| NO: 4142 | monoamine oxidase B | CTCCTCTCTATGAAT |
| | (MAOB), RefSeqGene on chromosome X | CTGGGAGGACTCTGT |
| | | CACGGCTTTGACCAG |
| SEQ ID | GI 237858716 NG_012099 Homo sapiens | AGCAATGGGGCTGGG |
| NO: 4143 | macrophage migration inhibitory factor | TGGGGTGAAGATTAG |
| | (MIF), RefSeqGene on chromosome 22 [symbol] | GAAGAGGAAGGAGAA |
| | | TAGAAGCTCCAGGGA |
| SEQ ID | GI 339639630 NG_029383 Homo sapiens | AGCCATAGCACCAAG |
| NO: 4144 | mucin 1, cell surface associated | ACTGATGCCAGTAGC |
| | (MUC1), RefSeqGene on chromosome 1 [symbol] | ACTCACCATAGCACG |
| | | GTACCTCCTCTCACC |
| SEQ ID | GI 237858596 NG_012143 Homo sapiens | CCAGGTAGGGACAGA |
| NO: 4145 | nuclear receptor subfamily 0 group B member 2 | CCAGGATGGCAACTC |
| | (NROB2), RefSeqGene on chromosome 1 [symbol] | AGGTCTATTCACTCC |
| | | AGAGACTGGCCCTTG |
| SEQ ID | GI 60391308 D50017 Homo sapiens | AGTGGTAGGTACCCT |
| NO: 4146 | PDGFRA gene for alpha-platelet-derived | CAAAACGTGCAATGG |
| | growth factor receptor, complete cds [symbol] | CTTGGAGCAGAGCAA |
| | | CAGGGCTCAGAAGAC |
| SEQ ID | GI 269954724 NG_016003 Homo sapiens | ACAGTGGTATACAGT |
| NO: 4147 | interferon alpha and beta receptor subunit 2 | GGCATTAAGGGGTGA |
| | (IFNAR2), RefSeqGene on chromosome 21 [symbol] | AAAGGTGGAAGCAGC |
| | | GAGGTTGGGTGCAGT |
| SEQ ID | GI 260593670 NG_013025 Homo sapiens | CAGATCCAGGGACTG |
| NO: 4148 | nucleotide binding oligomerization | GGCACAAACATCTGC |
| | domain containing 1 | CTGTTGAGTAGGAAC |
| | (NOD1), RefSeqGene on chromoso [symbol] | TGAGCTGTGGCCATT |
| SEQ ID | GI 194239686 NM_004591 Homo sapiens | TGCTGTACCAAGAGT |
| NO: 4149 | C-C motif chemokine ligand 20 | TTGCTCCTGGCTGCT |
| | (CCL20), transcript variant 1, mRNA [symbol] | TTGATGTCAGTGCTG |
| | | CTACTCCACCTCTGC |
| SEQ ID | GI 313569850 NM_144601 Homo sapiens | TCCTTCTCCCCATTT |
| NO: 4150 | CKLF like MARVEL transmembrane | CTGTCCCACAGGCCT |
| | domain containing 3 | TCAGCCCTTTAACGT |
| | (CMTM3), transcript variant 1, mRN [symbol] | CTCTGCCAAAAACCA |
| SEQ ID | GI 874507471 NM_005928 Homo sapiens | AAACCCCTGCCACAA |
| NO: 4151 | milkfat globule-EGF factor 8 protein | CGGTGGTTTATGCGA |
| | (MFGE8), transcript variant 1, mRNA [symbol] | GGAGATTTCCCAAGA |
| | | AGTGCGAGGAGATGT |
| SEQ ID | GI 325652102 NM_002811 Homo sapiens | TCAACCGAATCGGCA |
| NO: 4152 | proteasome 26S subunit, non-ATPase 7 | AGGTTGGAAACCAGA |
| | (PSMD7), mRNA [symbol] | AGCGTGTTGTTGGTG |
| | | TGCTTTTGGGGTCAT |
| SEQ ID | GI 1060099004 NM_001330400 Homo sapiens | GAAGCAGCATCAACC |
| NO: 4153 | sideroflexin 5 | TAGGAGCAGTGGGCC |
| | (SFXN5), transcript variant 1, mRNA | CTGGCTCTGTCACTA |
| | | AATGGCAGTGAGATG |
| SEQ ID | GI 197245396 NG_008399 Homo sapiens | AACAGCCCACATTGG |
| NO: 4154 | aspartoacylase | CCTGCTGGATAATGA |
| | (ASPA), RefSeqGene on chromosome 17 | AAGCCTTTGAGGTGG |
| | | AAAACTCAGGCACCC |
| SEQ ID | GI 336455032 NG_029156 Homo sapiens | GGCTATCCCAGTGGC |
| NO: 4155 | betaine-homocysteine S-methyltransferase | TTGTTGGGAGGGGTA |
| | (BHMT), RefSeqGene on chromosome 5 | TTTTCAGTCCAGACG |
| | | GTAGGCCTTCCTCTA |
| SEQ ID | GI 269954730 NG_016009 Homo sapiens | GGAGTCAGGAGACTC |
| NO: 4156 | kininogen 1 | AGTTCCACCATAGCA |
| | (KNG1), RefSeqGene on chromosome 3 | TCTGCCGCTCACATC |
| | | CCAGATCACTCTGGG |
| SEQ ID | GI 347658934 NG_030028 Homo sapiens | AAATGTGGGCTTCCT |
| NO: 4157 | mitochondrial antiviral signaling protein | TTCCTTTTGTTTGGG |
| | (MAVS), RefSeqGene on chromosome 20 | CCACATCATCCCTTC |
| | | CCCTCCATCTGTGGC |
| SEQ ID | GI 584458494 NG_033933 Homo sapiens | AAGTCGTTTTTGCCA |
| NO: 4158 | toll like receptor 9 | CACTGTGGGGTGTTG |
| | (TLR9), RefSeqGene on chromosome 3 | GGGTCACGTGTTTGC |
| | | AGGTTTGGGGAATTA |
| SEQ ID | GI 554506569 NM_001114 Homo sapiens | GTCGCTGCATGCCTG |
| NO: 4159 | adenylate cyclase 7 | ACAACAACTTCCACA |
| | (ADCY7), transcript variant 1, mRNA | GCCTCTACGTCAAGA |
| | | GGCACCAGAATGTCA |
| SEQ ID | GI 54112075 AY771350 Homo sapiens | CCACAGAAGCAAAGC |
| NO: 4160 | heme oxygenase | ATTGCTCATTTGGGT |
| | (decycling) 2 | GGTTCCCAACACAGA |
| | (HMOX2) gene, complete cds | CACATGGACGTGGGT |
| SEQ ID | GI 209447054 NG_008716 Homo sapiens | ACATAACCTGCTGGA |
| NO: 4161 | aminolevulinate dehydratase | AGGCAGGGACTCCAC |
| | (ALAD), RefSeqGene on chromosome 9 | TTCAGAAATCTTGGA |
| | | AAACCCTGTGGCCCA |
| SEQ ID | GI 294610641 NG_017089 Homo sapiens | AGCTGGGATTCTTCT |
| NO: 4162 | galectin 3 | TCAGAGCTTCAAGCG |
| | (LGALS3), RefSeqGene on chromosome 14 | GGGCCAGGCCTTTTT |
| | | ATACCCCCACTTTGA |
| SEQ ID | GI 269914179 NG_015979 Homo sapiens | TCTCAGTAGGCACAA |
| NO: 4163 | nitric oxide synthase 1 adaptor protein | GGCCAAAGTCAGCCG |
| | (NOSIAP), RefSeqGene on chromosome 1 | ACTTGCAGATTGTAA |
| | | TGCCGGTTCTCCCAC |
| SEQ ID | GI 195234781 NG_008319 Homo sapiens | TGGGTCTCTGGGCTG |
| NO: 4164 | pyruvate carboxylase | TCAGCTCTCTGGAGA |
| | (PC), RefSeqGene on chromosome 11 | GGAAAACAGGGTGAA |
| | | GGATCTTTGGGTGAT |
| SEQ ID | GI 342307060 NG_029601 Homo sapiens | GACTCGGGCTTGTGG |
| NO: 4165 | Pim-1 proto-oncogene, | TTTATGTTTATTTGC |
| | serine/threonine kinase | CCTTGGAGGACGCTG |
| | (PIM1), RefSeqGene on chromosome 6 | GGTTGGGCTGCATTT |
| SEQ ID | GI 62953114 NM_012342 Homo sapiens | GCGGCAACAGATGCT |
| NO: 4166 | BMP and activin membrane bound inhibitor | CTCCCGTTTGCACTA |
| | (BAMBI), mRNA | CAGCTTTCACGGACA |
| | | CCATTCCAAAAAGGG |
| SEQ ID | GI 145312264 NM_033266 Homo sapiens | CAAGCAGACAGGGGA |
| NO: 4167 | endoplasmic reticulum | CCTGAAGTGGACTCT |
| | to nucleus signaling 2 | GAGGGATGATCCCGT |
| | (ERN2), transcript variant 1, mRNA | CATCGAAGGACCAAT |
| SEQ ID | GI 27979118 AY219866 Homo sapiens | ACGCGTCACTCTTCT |
| NO: 4168 | caspase 3, apoptosis- | GCCCAACTTCATAGC |
| | related cysteine protease | CTCCTCTTGCTGGCC |
| | (CASP3) gene, complete cds | TCCTATCTGTATGCT |
| SEQ ID | GI 476704 L26336 Homo sapiens | TGAACCCCACCAACA |
| NO: 4169 | heat shock protein | CCATCTTCGACGCCA |
| | (HSPA2) gene, complete cds | AGAGGCTGATTGGAC |
| | | GGAAATTCGAGGATG |
| SEQ ID | GI 66841734 DQ073384 Homo sapiens | AGACATTTTGGTGGT |
| NO: 4170 | phosphatase and tensin homolog | CACAGCTGGGGTGGT |
| | (mutated in multiple advanced cancers 1) | AGAGTGTGCTATTGG |
| | (PTEN) gene, comp [symbol] | CTAGGGGCTTGAAGC |
| SEQ ID | GI 1150763505 NG_052952 Homo sapiens | GGGGCCTTCATTAGG |
| NO: 4171 | ezrin | GCGGTTAGTTTGAAG |
| | (EZR), RefSeqGene on chromosome 6 | GCTGTCCTGGAAGTT |
| | | GGAGAGTGACATGGG |
| SEQ ID | GI 299782605 NG_023187 Homo sapiens | ATGAGCACAAGGACT |
| NO: 4172 | major histocompatibility | GAACCCTGGACCAGT |
| | complex, class 1, B | TCTAAGGGGTGTGAT |
| | (HLA-B), RefSeqGene on chromosome 6 | CAGACCACACCCAGA |
| SEQ ID | GI 1114655579 NM_002969 Homo sapiens | AACGTGATCGGGCTG |
| NO: 4173 | mitogen-activated protein kinase 12 | CTGGACGTATTCACT |
| | (MAPK12), transcript variant 1, mRNA | CCTGATGAGACCCTG |
| | | GATGACTTCACGGAC |
| SEQ ID | GI 208431777 NM_001135638 Homo sapiens | TCATGCAGGGAAGTT |
| NO: 4174 | phosphatidylinositol-4- | GGAAATGGGGGCTAC |
| | phosphate 5-kinasetype 1 alpha | ATATGCCCTCTCCTC |
| | (PIP5K1A), transcript variant 1, [symbol] | CCCGTCTACAAGAGT |
| SEQ ID | GI 281485607 NM_003226 Homo sapiens | CCCAAGCAAACAATC |
| NO: 4175 | trefoil factor 3 | CAGAGCAGCTGTGCA |
| | (TFF3), mRNA | AACAACGGTGCATAA |
| | | ATGAGGCCTCCTGGA |
| SEQ ID | GI 85725379 DQ370420 Homo sapiens | AGCCAGGCTACTGCA |
| NO: 4176 | metallothionein 2A | CTGAGCTTCAGCTTC |
| | (MT2A) gene, complete cds | TGTAAAACTGAATGG |
| | | CGCTGTGCCAGATCA |
| SEQ ID | GI 343098522 NG_029664 Homo sapiens | CTGGCCTGCGTTCAC |
| NO: 4177 | cathepsin E | ACTGTTTCAGCATAA |
| | (CTSE), RefSeqGene on chromosome 1 | GCCCATTCCTCTCAT |
| | | TCCCCTCTCCCACAT |
| SEQ ID | GI 761631399 NG_042041 Homo sapiens | AGCACACTCCCATCA |
| NO: 4178 | integrin subunit beta 6 | CTACCTGCCTGCCTA |
| | (ITGB6), RefSeqGene on chromosome 2 | TGGAATGCTGACAAT |
| | | CGAAAGCCTGAAGGC |
| SEQ ID | GI 440918690 NM_001272072 Homo sapiens | GGAGACCGCCACCTT |
| NO: 4179 | amine oxidase, copper containing 1 | CCTGGACACTTTCCA |
| | (AOC1), transcript variant 1, mRNA | CTACTATGATGCCGA |
| | | TGACCCGGTCCATTA |
| SEQ ID | GI 189339218 NG_007955 Homo sapiens | TGCCTGGAGCTACAG |
| NO: 4180 | cytochrome P450 family | ATGACCGTTGCCCCA |
| | 17 subfamily A member 1 | CTCAACCAGGAAAAG |
| | (CYP17A1), RefSeqGene on chromosome [symbol] | AAGGCACTGCATTTA |
| SEQ ID | GI 1024846744 NG_047021 Homo sapiens | GAGAGCAAGCCATTC |
| NO: 4181 | nudix hydrolase 15 | AGGTGACTGATGCTG |
| | (NUDT15), RefSeqGene on chromosome 13 | CTCTGATCCATCCAT |
| | | TGGTGTCCTCTGGGC |
| SEQ ID | GI 297139734 NG_021330 Homo sapiens | TGACAAGAGCTGGGA |
| NO: 4182 | serum amyloid A1 | ACTAACGTGCCTCAA |
| | (SAA1), RefSeqGene on chromosome 11 | GCCCCCACAAGGACC |
| | | ACAGCATTTTCTCAT |
| SEQ ID | GI 237858805 NG_012139 Homo sapiens | GCCCTTTTTAGGGTC |
| NO: 4183 | uncoupling protein 1 | TCTGGCCACCAGAGC |
| | (UCP1), RefSeqGene on chromosome 4 | CAGCTTTACTCACCT |
| | | GTGCATGGCATTCTA |
| SEQ ID | GI 209862753 NM_004343 Homo sapiens | ATGCACGGAGACTCA |
| NO: 4184 | calreticulin | GAATACAACATCATG |
| | (CALR), mRNA | TTTGGTCCCGACATC |
| | | TGTGGCCCTGGCACC |
| SEQ ID | GI 54144649 NM_002090 Homo sapiens | ATGACAGGGTGGGGA |
| NO: 4185 | C-X-C motif chemokine ligand 3 | ACTGGAGGGTGGGGG |
| | (CXCL3), mRNA | GATTGAAATGCAAGC |
| | | AATTAGTGGATCACT |
| SEQ ID | GI 807201065 NM_001008397 Homo sapiens | GGGCTGAAGGAACTG |
| NO: 4186 | glutathione peroxidase 8 | CACAAAGAGTTTGGA |
| | (putative) | CCATCCCACTTCAGC |
| | (GPX8), transcript variant 1, mRNA | GTGTTGGCTTTTCCC |
| SEQ ID | GI 153791376 NM_024310 Homo sapiens | AGAAGGCCAAGCCGC |
| NO: 4187 | pleckstrin homology and | GCATCTTCTTCCTCT |
| | FYVE domain containing 1 | TTAACGACATCCTGG |
| | (PLEKHF1), mRNA | TGTATGGCAGCATCG |
| SEQ ID | GI 282721038 NG_016269 Homo sapiens | CCTGTCTTTGTCTCT |
| NO: 4188 | adenylate kinase 2 | GATGGGCTTTGGGAA |
| | (AK2), RefSeqGene on chromosome 1 | CAGACAGCATCCTGG |
| | | GCAGAATGGTCCCAT |
| SEQ ID | GI 974987493 NG_012830 Homo sapiens | ACAGTGGAAGTTTGA |
| NO: 4189 | DEAD-box helicase 3, X-linked | ACAGTGGAGACTGTG |
| | (DDX3X), RefSeqGene on chromosome X | GGAGCCCAGTGCCCA |
| | | GAGCAACCTACTCTA |
| SEQ ID | GI 224809272 NG_011478 Homo sapiens | GTGTGTCAAAGCTAA |
| NO: 4190 | uncoupling protein 2 | ACAGGCTGGGTGGGC |
| | (UCP2), RefSeqGene on chromosome 11 | ATGAGCAAGTCAGCT |
| | | GGTTCATTCAGCAGC |
| SEQ ID | GI 164698262 AK314515 Homo sapiens | GCCGGGAGAAACAAG |
| NO: 4191 | cDNA, FLI95334, Homo sapiens | CACGGACGCAAACAC |
| | protein inhibitor of activated STAT, 1 | GAACTTCTCACAAAA |
| | (PIAS1), mRNA | GCCCTGCATTTGCTA |
| SEQ ID | GI 527317415 NM_000304 Homo sapiens | CACCAAACGAATGGC |
| NO: 4192 | peripheral myelin protein 22 | TGCAGTCTGTCCAGG |
| | (PMP22), transcript variant 1, mRNA | CCACCATGATCCTGT |
| | | CGATCATCTTCAGCA |
| SEQ ID | GI 42519913 NM_012448 Homo sapiens | ACAAGCTCAGCAGCT |
| NO: 4193 | signal transducer and | CCAAGGAGAAGCCCT |
| | activator of transcription 5B | TCATCAGATGCAAGC |
| | (STAT5B), mRNA | GTTATATGGCCAGCA |
| SEQ ID | GI 282721038 NG_016269 Homo sapiens | TGTGGAACAGGGAAA |
| NO: 4194 | adenylate kinase 2 | GCTGATGCCTGTGTT |
| | (AK2), RefSeqGene on chromosome 1 | TTGGTCAACCCCATT |
| | | CTCTCCTGGCACTCT |
| SEQ ID | GI 269954683 NG_015990 Homo sapiens | ACCCGAAAGAACCGC |
| NO: 4195 | C-C motif chemokine ligand 5 | CAAGTGTGTGCCAAC |
| | (CCL5), RefSeqGene on chromosome 17 | CCAGAGAAGAAATGG |
| | | GTTCGGGAGTACATC |
| SEQ ID | GI 398303864 NG_032876 Homo sapiens | TTCCTCACCACAGAG |
| NO: 4196 | major histocompatibility | GTTCCTGAGGTCACA |
| | complex, class II, DQ alpha 1 | GTGTTTTCCAAGTCT |
| | (HLA-DQA1), RefSeqGene on chromos [symbol] | CCCGTGACACTGGGT |
| SEQ ID | GI 429535871 NG_033022 Homo sapiens | TCCCTTCCTGCCCCT |
| NO: 4197 | interleukin 12A | CCTCAGAAGCTTCAT |
| | (IL12A), RefSeqGene on chromosome 3 | GCCCTTCTCACCATG |
| | | TCTCACCTACTGATG |
| SEQ ID | GI 1145140176 NG_008729 Homo sapiens | GGGAAGAATGAGCTG |
| NO: 4198 | superoxide dismutase 2 | GGCCATTGTGAAGGG |
| | (SOD2), RefSeqGene on chromosome 6 | AAACTCCAGGAAGCT |
| | | GGGTCTTCACTGAGG |
| SEQ ID | GI 584277093 NM_001675 Homo sapiens | TGGCTTCTGATTCTC |
| NO: 4199 | activating transcription factor 4 | ATTCAGGCTTCTCAC |
| | (ATF4), transcript variant 1, mRNA | GGCATTCAGCAGCAG |
| | | CGTTGCTGTAACCGA |
| SEQ ID | GI 205277450 NM_001135054 Homo sapiens | GGGGCCTTCACCTGC |
| NO: 4200 | single Ig and TIR domain containing | TCCATCCAGAACATC |
| | (SIGIRR), transcript variant 1, mRNA | AGCTTCTCCTCCTTC |
| | | ACTCTTCAGAGAGCT |
| SEQ ID | GI 1036032775 AH003000 Homo sapiens | ACAACCCGTCTTTCA |
| NO: 4201 | steroid 5-alpha-reductase | GAAAAGCGGCGTGAC |
| | (SRD5A1) gene, complete cds | AGGGAAAACAGCGAA |
| | | CAGCTCTAAGGGGAA |
| SEQ ID | GI 326806980 NG_028248 Homo sapiens | CCTGTAGGTCTTTGC |
| NO: 4202 | aryl hydrocarbon receptor | CTGCTGAGGGCAGGG |
| | nuclear translocator | GTTTGTGTAATGGTT |
| | (ARNT), RefSeqGene on chromosome 1 | ATGGTTCCGGACAGG |
| SEQ ID | GI 219521823 NG_009222 Homo sapiens | GGGGCCGTTTAGCCT |
| NO: 4203 | ELK1, ETS transcription factor | AATGGTGAAATGCTT |
| | (ELK1), RefSeqGene on chromosome X | AGTCAACTGGAACCT |
| | | GACTGCCTGGCTCCA |
| SEQ ID | GI 1028224162 NG_047195 Homo sapiens | ATACAGAGCAGCAGA |
| NO: 4204 | transducin beta like 1 | GCAAGGCAGTTCTGT |
| | X-linked receptor 1 | GAAGTTTGTCCCTGG |
| | (TBL1XR1), RefSeqGene on chromosome 3 | CAGCCCTTAGCAGTG |
| SEQ ID | GI 49574519 NM_052972 Homo sapiens | GCTGGGACCCCGTTT |
| NO: 4205 | leucine rich alpha-2-glycoprotein 1 | CATCCATCCATGCTT |
| | (LRG1), mRNA | CCTAGAACACACGAT |
| | | GGGCTTTCCTTACCC |
| SEQ ID | GI 296841050 NM_138733 Homo sapiens | GTCACCACCGACCCA |
| NO: 4206 | phosphoglycerate kinase 2 | GCCCCTCAACAGCAA |
| | (PGK2), mRNA | GTTGGTTCTTCAGCA |
| | | TTAAGATCCAGGTGT |
| SEQ ID | GI 89142743 NM_023068 Homo sapiens | ACCAGACAGTGACAC |
| NO: 4207 | sialic acid binding Ig like lectin 1 | TAGTCTGCAACACAC |
| | (SIGLEC1), mRNA | CCAATGAGGCACCCA |
| | | GTGATCTCCGCTACA |
| SEQ ID | GI 94717603 DQ508420 Homo sapiens | ATGTTTTTGGGTTGG |
| NO: 4208 | caspase 5, apoptosis- | TCCAGAAAAGCCTCT |
| | related cysteine peptidase | GTGGGGAGAGAACAC |
| | (CASP5) gene, complete cds | AGGAGTTGGACGGCA |
| SEQ ID | GI 1015635417 AH006868 Homo sapiens | TGCCCAATGAAAAGT |
| NO: 4209 | CD9 antigen | ATGGTCAGCGAGCGA |
| | (CD9) gene, complete cds | AGGTTTGCAAGGAGA |
| | | CAGACGAGGGCGAAA |
| SEQ ID | GI 1213447 U48869 Human | CAACCGGCGGCGGCT |
| NO: 4210 | cdk-inhibitor p57/KIP2 | GCCGCAGAGCAGCGT |
| | (CDKNIC) gene, complete cds | TCGGTTTTGTTTTTA |
| | | AATTTTGAAAACTGT |
| SEQ ID | GI 237874266 NG_012190 Homo sapiens | CTGGGGAAGTGACCA |
| NO: 4211 | anti-Mullerian hormone | GGGTGGAAGATAGAG |
| | (AMH), RefSeqGene on | ACTTGTGTCCATAGG |
| | chromosome 19 | GTTCAGGAAGGCGGG |
| SEQ ID | GI 33946335 NM_002166 Homo sapiens | AACCCCTGTGGACGA |
| NO: 4212 | inhibitor of DNA binding 2, HLH protein | CCCGATGAGCCTGCT |
| | (ID2), mRNA | ATACAACATGAACGA |
| | | CTGCTACTCCAAGCT |
| SEQ ID | GI 78190493 NM_013434 Homo sapiens | GAATGAGTGTCCCAC |
| NO: 4213 | potassium voltage-gated | GGGCCTGGTGGACGA |
| | channel interacting protein 3 | AGACACCTTCAAACT |
| | (KCNIP3), transcript variant 1, mRNA | CATTTACGCGCAGTT |
| SEQ ID | GI 77744386 DQ230907 Homo sapiens | CACAGACGTTAGCCC |
| NO: 4214 | nudix | CCGTTCGTGTTTTTG |
| | (nucleoside diphosphate | TTCTGAGAAAGGTAG |
| | linked moiety X)-type motif 1 | GCCAGCTTGCCTGGA |
| | (NUDT1) gene, complete cds | |
| SEQ ID | GI 224809239 NG_011444 Homo sapiens | GCTCTCCCTATGTTG |
| NO: 4215 | fatty acid binding protein 2 | CTTAGGCTGGCCTCA |
| | (FABP2), RefSeqGene on chromosome 4 | AACTGCTGGTTTCGA |
| | | ACTCCTGGCCTGAAG |
| SEQ ID | GI 308199420 NG_027788 Homo sapiens | GGCAGCACTTCCCAA |
| NO: 4216 | MX dynamin like GTPase 1 | CCTTCCTGACATGGG |
| | (MX1), RefSeqGene on chromosome 21 | CGTTTCTGTGAACTC |
| | | CAGTGTGATGGAGAA |
| SEQ ID | GI 37675281 NM_020664 Homo sapiens | CGTGGACCAGGCTCT |
| NO: 4217 | 2,4-dienoyl-CoA reductase 2 | GAAGGAGTTTGGCAG |
| | (DECR2), mRNA | AATCGACATTCTCAT |
| | | TAACTGTGCGGCCGG |
| SEQ ID | GI 148227403 NM_005292 Homo sapiens | CGTCTGCTTTATGCC |
| NO: 4218 | G protein-coupled receptor 18 | CTTCCACATCTGTTT |
| | (GPR18), transcript variant 1, mRNA | CGCTTTCCTGATGCT |
| | | GGGAACGGGGGAGAA |
| SEQ ID | GI 20160210 AY094608 Homo sapiens | AAGACCGAACTGGTT |
| NO: 4219 | cyclin-dependent kinase inhibitor 2C | TCGCTGTCATTCATG |
| | (CDKN2C) gene, complete cds | ATGCGGCCAGAGCAG |
| | | GTTTCCTGGACACTT |
| SEQ ID | GI 283837929 NG_016244 Homo sapiens | ACTCAACCCAGACAG |
| NO: 4220 | toll like receptor 5 | ATGGTTAGCTCCCCG |
| | (TLR5), RefSeqGene on chromosome 1 | ACAGGACTTAAGCAA |
| | | GTGGGCCAGTCTCTG |
| SEQ ID | GI 210032511 NG_008871 Homo sapiens | TCACTTCCTGGTGGG |
| NO: 4221 | xanthine dehydrogenase | CGTTAGACACATACC |
| | (XDH), RefSeqGene on chromosome 2 | CTGCTGAGCAGATCA |
| | | GCTAGGAAAAGCCCT |
| SEQ ID | GI 57863305 NM_052872 Homo sapiens | GAAATGCCACTCCTT |
| NO: 4222 | interleukin 17F | ACCCAGTGCTCTGCA |
| | (IL17F), mRNA | ACAAGTCCTGTCTGA |
| | | CCCCCAATTCCCTCC |
| SEQ ID | GI 528078360 NM_003955 Homo sapiens | TCCTCAGCTTCCCCT |
| NO: 4223 | suppressor of cytokine signaling 3 | CTGCCTCCAAACAGG |
| | (SOCS3), mRNA | GGACACTTCGGGAAT |
| | | GCTGAACTAATGAGA |
| SEQ ID | GI 313661479 NM_145725 Homo sapiens | TACTTTGGGGGAATG |
| NO: 4224 | TNF receptor associated factor 3 | AGTATCCTTGGTTCT |
| | (TRAF3), transcript variant 1, mRNA | GCCCTGTGAGGGAGT |
| | | CGTGTGTCCCTGCTC |
| SEQ ID | GI 45238842 AY563103 Homo sapiens | TCTGTCGCCGTTTGT |
| NO: 4225 | interleukin 2 receptor, alpha | CCTGGGTGAGGTCAT |
| | (IL2RA) gene, complete cds | TCTGGTCATCTGTGG |
| | | CAGGAGGACTACAAA |
| SEQ ID | GI 344925888 NG_029692 Homo sapiens | GAGGCAGACATCTGG |
| NO: 4226 | 2′-5′-oligoadenylate synthetase 2 | GAAAAGTCCAGCTGG |
| | (OAS2), RefSeqGene on chromosome 12 | GGCAAGCATTTGAAG |
| | | TCTGCCTTCCTACCA |
| SEQ ID | GI 574997036 NG_033896 Homo sapiens | GGATCTGAGGAGATC |
| NO: 4227 | tubulin beta 4A class IVa | TCAGGAGCACAGAGT |
| | (TUBB4A), RefSeqGene on chromosome 19 | GGGTGCTTGGTGGCA |
| | | GAGGTACTGCTGTTC |
| SEQ ID | GI 815890844 NM_001836 Homo sapiens | GCAGCAAAGTGTGTG |
| NO: 4228 | chymase 1 | CCACTCATTCTGGTC |
| | (CMA1), transcript variant 1, mRNA | TACCCTTGGTCCCTC |
| | | AGCCACAACCCTAAG |
| SEQ ID | GI 67515420 DQ088846 Homo sapiens | TGGATGGGAGAACAG |
| NO: 4229 | myeloperoxidase | CTTAAAAGCCATCCT |
| | (MPO) gene, complete cds | TCCCAAAGCCTTGCC |
| | | TCTGTCTGGACACCC |
| SEQ ID | GI 527498317 NG_008179 Homo sapiens | TAGCATCTCTGTCCT |
| NO: 4230 | general transcription factor Ili | GTGTTGAGTTGTGGT |
| | (GTF2I), RefSeqGene on chromosome 7 | TGCCCGTCACTGGGC |
| | | TGTAAAGTGCCTTGC |
| SEQ ID | GI 156105692 NM_001037335 Homo sapiens | GGGCCCCATCTCACC |
| NO: 4231 | helicase with zinc finger 2 | AACCAACTATCGGCA |
| | (HELZ2), transcript variant 1, mRNA | GAGGATGCACCAGTT |
| | | TCTCTATGAGGAGGA |
| SEQ ID | GI 117606543 EF064746 Homo sapiens | CTGCAAGGCCCACCT |
| NO: 4232 | complement component | TCTAGTCGGTGTGTA |
| | (3d/Epstein Barr virus) receptor 2 | ATTGCTGGACAGGGA |
| | (CR2) gene, complete cds | GTTGCTTGGACCAAA |
| SEQ ID | GI 68165954 DQ086801 Homo sapiens | GAAGAGCTCCGCGGA |
| NO: 4233 | suppressor of cytokine signaling 1 | GTACAGAGCCCATTT |
| | (SOCS1) gene, complete cds | TCTAGCTGTGTCCAC |
| | | TGAGGCTGAACGGAT |
| SEQ ID | GI 284055256 NG_016403 Homo sapiens | TGGCCTGCAACTGTA |
| NO: 4234 | dystrophin related protein 2 | CCCTCTGGAGTGGGA |
| | (DRP2), RefSeqGene on chromosome X | AGCAGGCAGAAAGCC |
| | | CTATACTTAACTGGA |
| SEQ ID | GI 308522770 NM_005469 Homo sapiens | CTGGACGAGGATCTC |
| NO: 4235 | acyl-CoA thioesterase 8 | TTCAGAGGAAGGCAT |
| | (ACOT8), mRNA | TACTGGGTACCGGCC |
| | | AAGAGGCTGTTTGGT |
| SEQ ID | GI 117606573 EF064761 Homo sapiens | TGGCTCCATTGGCTC |
| NO: 4236 | chemokine | AGGTGGTTTAGTCAT |
| | (C-C motif) ligand 28 | TGGGAACCAGCATCA |
| | (CCL28) gene, complete cds | TCTGTGGCACTCCAG |
| SEQ ID | GI 20514390 AF507942 Homo sapiens | ATGGAGTGGCTGCCA |
| NO: 4237 | cyclin-dependent kinase 4 | TGGAAGGAAGAAAAG |
| | (CDK4) gene, complete cds | CTGCCATTTCCCTTC |
| | | TGGACACTGAGAGGG |
| SEQ ID | GI 62632868 AY995114 Homo sapiens | TTCACCGCCTCACCT |
| NO: 4238 | tumor necrosis factor receptor | ACTAAATCAGGCTCT |
| | 1-associated death domain protein | CCGGAAAGGGTAAGG |
| | (TRADD) gene, complete cds [symbol] | CCCAGGAATCTGCAT |
| SEQ ID | GI 395393980 NG_011966 Homo sapiens | CAGACCGGCTCTAAA |
| NO: 4239 | mitogen-activated protein | GGCCTAAGGGGAGGA |
| | kinase kinase kinase 7 | CTGGTGTAAGTCCTG |
| | (MAP3K7), RefSeqGene on chromosome 6 | AAGTCCAAAGGCCAA |
| SEQ ID | GI 584277161 NG_008225 Homo sapiens | ACGCCTCTGCAACTC |
| NO: 4240 | POU class 1 homeobox 1 | TGCCTCTGATAATGC |
| | (POU1F1), RefSeqGene on chromosome 3 | ATCACAGTGCTGCCG |
| | | AGTGTCTACCAGTCT |
| SEQ ID | GI 42794751 NM_004457 Homo sapiens | AAGGACTGGGGAAAC |
| NO: 4241 | acyl-CoA synthetase long chain | AGCTGTAACATTTGC |
| | family member 3 | CACCCTCAGAAGCTG |
| | (ACSL3), transcript variant 1, mRNA | CTGGTCCTGTGTCAC |
| SEQ ID | GI 392050748 NM_001267774 Homo sapiens | CGGCTTGACCAATGA |
| NO: 4242 | intraflagellar transport 20 | CCTATGTCACAAGAG |
| | (IFT20), transcript variant 1, mRNA | GTGGCGTGTAAGGAA |
| | | TGCAGCCCCCTGAAG |
| SEQ ID | GI 170560906 EU567146 Homo sapiens | CCCCAGAGCTAAATC |
| NO: 4243 | solute carrier family 22 | AAGTACATCCCAGCC |
| | (organic anion transporter), member 6 | CAAAGGCCCCTCCCA |
| | (SLC22A6) gene, complete cds | ACACTCATCATTGCA |
| SEQ ID | GI 110735399 NM_001031680 Homo sapiens | TAGGCAGTCCTTCTG |
| NO: 4244 | runt related transcription factor 3 | GTGATCCTATTCCAT |
| | (RUNX3), transcript variant 1, mRNA | TCCCTCCTGCTGCGG |
| | | TTTCTCTTGGCCTGT |
| SEQ ID | GI 29825390 AY242132 Homo sapiens | AGGCCTTTGCTTTCT |
| NO: 4245 | cannabinoid receptor 2 | GCTCCATGCTGTGCC |
| | (CNR2) gene, complete cds | TCATCAACTCCATGG |
| | | TCAACCCTGTCATCT |
| SEQ ID | GI 306816 M96233 Human glutathione | GACCTCCTGAGGGAT |
| NO: 4246 | transferase class mu number 4 | TTGGGGGAGGATGGG |
| | (GSTM4) gene, complete cds | GATTTGACAGAAAGA |
| | | GGCCAGAACTGGAGA |
| SEQ ID | GI 300244555 NG_023331 Homo sapiens | GTAGGAGCCTCTCTC |
| NO: 4247 | matrix Gia protein | CCTACTGCTGCTACA |
| | (MGP), RefSeqGene on chromosome 12 | CAAGACCCTGAGACT |
| | | GACCTGCAGGACGAA |
| SEQ ID | GI 262331544 NG_013350 Homo sapiens | TGAAACCAGACAGGA |
| NO: 4248 | nuclear receptor subfamily | ACCAAGCCATCTGCT |
| | 3 group C member 2 | CCCGGAACAGTGCTC |
| | (NR3C2), RefSeqGene on chromosome 4 | TGCCATTGCACTAAG |
| SEQ ID | GI 117606579 EF064764 Homo sapiens | GCTGAGTGAACAGGG |
| NO: 4249 | chemokine | TGCCACCAGAGTGTG |
| | (C-C motif) ligand 22 | GGTATGGCAGTAGGT |
| | (CCL22) gene, complete cds | AGTCAGTAGCTGTGG |
| SEQ ID | GI 27368251 AY196903 Homo sapiens | AACAGAGCTCCTTGG |
| NO: 4250 | interleukin 1 receptor antagonist | ACCCTTCCCTCTAAG |
| | (ILIRN) gene, complete cds | GTCTCTGGAAATGGG |
| | | AAACCCTGCAGAGGG |
| SEQ ID | GI 30526191 AY275469 Homo sapiens | CTTTGCTACCCTCGC |
| NO: 4251 | chemokine C motif receptor 1 | CACCACTGTCCTATA |
| | (XCR1) gene, complete cds | CTGCCTGGTGTTTCT |
| | | CCTCAGCCTAGTGGG |
| SEQ ID | GI 189217849 NG_007932 Homo sapiens | AATGGGTGGAGACAT |
| NO: 4252 | cytochrome P450 family 4 | TCCCAAGTGCCTGTC |
| | subfamily A member 11 | CTCATTGGCTATGGG |
| | (CYP4A11), RefSeqGene | GAGGCAAAGTTCGTG |
| | on chromosome [symbol] | |
| SEQ ID | GI 324711016 NG_012837 Homo sapiens | CACATGACAACTTCC |
| NO: 4253 | GC, vitamin D binding protein | CACCCAGTCCTCTGC |
| | (GC), RefSeqGene on chromosome 4 | TTTGTTCTCCAGGCC |
| | | ACTTAGCAAGCCCAT |
| SEQ ID | GI 374088072 NG_032029 Homo sapiens | TTTGCAGAGCTGAGC |
| NO: 4254 | MAP kinase interacting | TAGCCAGCAAAGTCG |
| | serine/threonine kinase 1 | GGTTCTCAGTGGGGA |
| | (MKNK1), RefSeqGene on chromosome 1 | GAGGATCATCTCTGG |
| SEQ ID | GI 260593656 NG_013016 Homo sapiens | TTCTTCCTGGAGCTC |
| NO: 4255 | phosphoglycerate mutase 2 | TTTCTGTTGGTGCAC |
| | (PGAM2), RefSeqGene on chromosome 7 | TTGAGGTTTCAAGCC |
| | | GCCTGTGTGTCCAGG |
| SEQ ID | GI 353249887 NG_030361 Homo sapiens | CCATGCCAGGCCTCC |
| NO: 4256 | Spl transcription factor | AGACCATTAACCTCA |
| | (SP1), RefSeqGene on chromosome 12 | GTGCATTGGGTACTT |
| | | CAGGAATCCAGGTGC |
| SEQ ID | GI 257153325 NG_012807 Homo sapiens | ACATCCTCAAGTAAG |
| NO: 4257 | ST3 beta-galactoside alpha-2,3- | TACCGCCCCTGGGAC |
| | sialyltransferase 5 | TGTAGATCCCCCTGC |
| | (ST3GAL5), RefSeqGene on chromosome [symbol] | TTTGGGTCAACTGTG |
| SEQ ID | GI 748585173 NM_198580 Homo sapiens | TGAAAGCTTCCGGAA |
| NO: 4258 | solute carrier family 27 member 1 | TTGACTGTGACCACT |
| | (SLC27A1), mRNA | TGGATGTCACCACTG |
| | | TCAGCCCCTGCCTTG |
| SEQ ID | GI 27501923 AY204752 Homo sapiens | TGAGCCAGGATTCCT |
| NO: 4259 | excision repair cross-complementing | GCTTCTGAGCCAGGC |
| | rodent repair deficiency, | AGTGGTCAGAGTCCC |
| | complementation group 6 | ATAAACTGTGTGTCT |
| | (ERCC | |
| SEQ ID | GI 189458805 NG_007981 Homo sapiens | GTCCTCGTTCCAGTT |
| NO: 4260 | ATP binding cassette subfamily A member 1 | TCACTGATGACCTCT |
| | (ABCA1), RefSeqGene on chromosome 9 | CGACCAGCTCCCTCA |
| | | CAGCAGTCTTTGCCA |
| SEQ ID | GI 429535873 NG_033024 Homo sapiens | GCCTGCCTGTGTCAT |
| NO: 4261 | colony stimulating factor 2 | GGCCTCAGCCCTGAT |
| | (CSF2), RefSeqGene on chromosome 5 | GTCATCTTTCCATGA |
| | | GAAAGATGTGTGGCT |
| SEQ ID | GI 570700862 NG_033874 Homo sapiens | ATTGGGTGTTTCCTG |
| NO: 4262 | nuclear factor kappa B subunit 2 | CAGCTCCAGGGGTTG |
| | (NFKB2), RefSeqGene on chromosome 10 | CTGAGATAAGGAATA |
| | | CAAAGCCCCCAGCTT |
| SEQ ID | GI 224809368 NG_011523 Homo sapiens | ATCCCTCCCCATCAC |
| NO: 4263 | TIR domain containing adaptor protein | AAGGTTCTTAATCAC |
| | (TIRAP), RefSeqGene on chromosome 11 | AGCTGCCGAATCCCC |
| | | TTTTGCCACGGAAGG |
| SEQ ID | GI 49574517 NM_003695 Homo sapiens | TCTCGCTTCTGCAAG |
| NO: 4264 | lymphocyte antigen 6 family member D | ACCACGAACACAGTG |
| | (LY6D), mRNA | GAGCCTCTGAGGGGG |
| | | AATCTGGTGAAGAAG |
| SEQ ID | GI 751368105 NM_145911 Homo sapiens | AATATTTGCGGGCGT |
| NO: 4265 | zinc finger protein 23 | GAAGCGGCCCGAGGT |
| | (ZNF23), transcript variant 1, mRNA | GATACCACAAGTCTT |
| | | TTGACATGCTGAGGT |
| SEQ ID | GI 154482086 EU048234 Homo sapiens | ACCTTGTGCCTTGGA |
| NO: 4266 | CCAAT/enhancer binding protein | AATGCAAACTCACCG |
| | (C/EBP), alpha | CTCCAATGCCTACTG |
| | (CEBPA) gene, complete cds | AGTAGGGGGAGCAAA |
| SEQ ID | GI 262205923 NM_013444 Homo sapiens | AGTACCCCAGGCATG |
| NO: 4267 | ubiquilin 2 | CAGAGCCTGCTGCAA |
| | (UBQLN2), mRNA | CAGATAACTGAAAAC |
| | | CCCCAGCTGATTCAG |
| SEQ ID | GI 648216382 NG_029573 Homo sapiens | TCTTGACAGGTAGGT |
| NO: 4268 | TNF receptor superfamily member 8 | GGCAAAGGCTCTGGA |
| | (TNFRSF8), RefSeqGene on chromosome 1 | AGGGCCAGAACATCA |
| | | CTGCAGCCATGTTTT |
| SEQ ID | GI 411147377 NM_014339 Homo sapiens | TGGCTTTTCTTCCTG |
| NO: 4269 | interleukin 17 receptor A | ACTGCAATGTGGCAT |
| | (IL17RA), transcript variant 1, mRNA | TGTGCCAGCTACCTC |
| | | CTCTTTCTCGGCCTC |
| SEQ ID | GI 387849236 NM_002613 Homo sapiens | GTAGTTGGGGTCCAT |
| NO: 4270 | 3-phosphoinositide dependent protein kinase 1 | TGATTGTGCAGGGGA |
| | (PDPK1), transcript variant 1, mRNA | ACGTGCAGGAGGTTT |
| | | TTCTAGGCACCGTGT |
| SEQ ID | GI 306518675 NG_027688 Homo sapiens | ACACTCACACCCACA |
| NO: 4271 | CD4 molecule | CTCTCACCCCATGTA |
| | (CD4), RefSeqGene on chromosome 12 | CTCACACCCATGCAC |
| | | TCACACACTGTCACA |
| SEQ ID | GI 1147544507 NG_028250 Homo sapiens | AGCCACCTGCACTAA |
| NO: 4272 | PPARG coactivator 1 alpha | CCAGTTCATGGACTG |
| | (PPARGCIA), RefSeqGene on chromosome 4 | AATGGCCAAGCAGTG |
| | | CATGCAGCCAAAAAG |
| SEQ ID | GI 342349297 NG_029616 Homo sapiens | TGGGAGGGAGAGTCA |
| NO: 4273 | protein kinase C zeta | GTCAGTGATGTGTTT |
| | (PRKCZ), RefSeqGene on chromosome 1 | GAGCTGCTGTGTCCA |
| | | CCTGGAAACCATCGT |
| SEQ ID | GI 227908773 NG_011948 Homo sapiens | CAGGAGTTGGCCCCT |
| NO: 4274 | triosephosphate isomerase 1 | CTCCTTTTGCTACAA |
| | (TPI1), RefSeqGene on chromosome 12 | ATCCTTGCCTTGCAA |
| | | AGGGGAGGTGAGGAT |
| SEQ ID | GI 564730481 NM_001287262 Homo sapiens | GGAAGGTGGCTGAGA |
| NO: 4275 | butyrophilin like 10 | GCCACCTGCCCGGTG |
| | (BTNL10), mRNA | AGTCCTCTATTCAGT |
| | | TCTGTCCTCACAATC |
| SEQ ID | GI 18653447 AF478696 Homo sapiens | TGAACCAAACAGGAA |
| NO: 4276 | coagulation factor II | CCCAAACCCCCAGCT |
| | (thrombin) | GCTCTGACACCAAGG |
| | (F2) gene, complete cds | ACTTCCCTAAGCATG |
| SEQ ID | GI 224809231 NG_011436 Homo sapiens | GACATTTCCTCTGCT |
| NO: 4277 | alpha 2-HS glycoprotein | GCCAAACCCATGGCA |
| | (AHSG), RefSeqGene on chromosome 3 | CTCTGAGGCTGACTG |
| | | TGTCCACCTCATTCC |
| SEQ ID | GI 315506987 NG_028041 Homo sapiens | TGAGGGGTAACCTTT |
| NO: 4278 | adenylate kinase 3 | CCTCCAGTGAATAGA |
| | (AK3), RefSeqGene on chromosome 9 | AGCCCAGAGCACCAC |
| | | TCGGATGGAGCCAAC |
| SEQ ID | GI 301500676 NG_023437 Homo sapiens | AGGTCAGGAGGCAGT |
| NO: 4279 | apolipoprotein L4 | AAGGTGGCTTGAGAG |
| | (APOL4), RefSeqGene on chromosome 22 | TTTGTGTGCAGCCAG |
| | | GACTAATAGCCAGGT |
| SEQ ID | GI 225637493 NG_011688 Homo sapiens | CATCATCCCTCTAGG |
| NO: 4280 | growth hormone receptor | AATGGGCCTGCCTTG |
| | (GHR), RefSeqGene on chromosome 5 | GTGTCCTTGTCATGC |
| | | AAAGTCACTGGCTGG |
| SEQ ID | GI 342187223 NG_029593 Homo sapiens | GGCACCAGAAGGTAT |
| NO: 4281 | LYN proto-oncogene, | GAAGGGCCTTGGAGT |
| | Src family tyrosine kinase | ACTGGGCTTTCTTAT |
| | (LYN), RefSeqGene on chromosome 8 | GGCTGCGAGAGAGGA |
| SEQ ID | GI 42794751 NM_004457 Homo sapiens | GCTTGCTAGGGGGAA |
| NO: 4282 | acyl-CoA synthetase | ATATTCGTCTCCTGT |
| | long chain family member 3 | TGTGTGGTGGCGCTC |
| | (ACSL3), transcript variant 1, mRNA | CACTTTCTGCAACCA |
| SEQ ID | GI 18034675 AF458059 Homo sapiens | GACCCCTCAACAGCA |
| NO: 4283 | IL25 mRNA, complete cds | GGGCCATCTCCCCCT |
| | | GGAGATATGAGTTGG |
| | | ACAGAGACTTGAACC |
| SEQ ID | GI 748585188 NM_004040 Homo sapiens | GAAGCACTTCTGTCC |
| NO: 4284 | ras homolog family member B | CAATGTGCCCATCAT |
| | (RHOB), mRNA | CCTGGTGGCCAACAA |
| | | AAAAGACCTGCGCAG |
| SEQ ID | GI 312434026 NM_002995 Homo sapiens | ACCACAGGAAGTGCA |
| NO: 4285 | X-C motif chemokine ligand 1 | CTGACCACTGGAGGC |
| | (XCL1), mRNA | ATAAAAGAGGTCCTC |
| | | AAAGAGCCCGATCCT |
| SEQ ID | GI 38045925 AY449709 Homo sapiens | ATGGATTCTGGGAAT |
| NO: 4286 | interleukin 7 receptor | GGCCAGAAAAACAAA |
| | (IL7R) gene, complete cds | TGCCTGTGGTTGTGA |
| | | GCAGTGCCCACACCC |
| SEQ ID | GI 166235119 NG_007149 Homo sapiens | ACTTGTCATGGTGAA |
| NO: 4287 | B-cell CLL/lymphoma 6 | ATGGCAAATCTGGGC |
| | (BCL6), RefSeqGene on chromosome 3 | TTCCTGTGGTTCCAG |
| | | AAGCCTGCGACTGGA |
| SEQ ID | GI 225543208 NG_011640 Homo sapiens | ATCCATGCCCACCTT |
| NO: 4288 | interleukin 6 | TGGCATGAGCTGAGG |
| | (IL6), RefSeqGene on chromosome 7 | GTTATTGCTTCTCAG |
| | | GGCTTCCTTTTCCCT |
| SEQ ID | GI 209447076 NG_008726 Homo sapiens | AAGGACGTCCATTGG |
| NO: 4289 | paraoxonase 3 | AAACGCCGGACTTGG |
| | (PON3), RefSeqGene on chromosome 7 | GAGAGAGGATCAGGC |
| | | TACCAGTTGGATGTT |
| SEQ ID | GI 1003088850 NM_007368 Homo sapiens | TGACCCGGCCCTGTA |
| NO: 4290 | RAS p21 protein activator 3 | GCTACAGCAAGAAGT |
| | (RASA3), transcript variant 1, mRNA | CCCACTTTGACTTTG |
| | | AGGAGGAAGACGTGG |
| SEQ ID | GI 81301989 DQ217942 Homo sapiens | GCAACAGAATTGGCA |
| NO: 4291 | EGF-like module containing | TCCTCCAGGCACTTG |
| | mucin-like hormone receptor-like 1 | TTAGAAATGCAAAAT |
| | (EMR1) gene, complete cds | CCCCGGCCCCCTTCC |
| SEQ ID | GI 20336662 AF503510 Homo sapiens | GGTGAGAGACAAAGG |
| NO: 4292 | coagulation factor X | AGACACAGGCAGAGA |
| | (F10) gene, complete cds | GATGTGGACAGCACA |
| | | GCCCACAGACACACA |
| SEQ ID | GI 117606489 EF064719 Homo sapiens | CTGCCCACACTTGTT |
| NO: 4293 | interleukin 27 receptor, alpha | TCCTGGCCTAAGGGC |
| | (IL27RA) gene, complete cds | TTTTTCTGGTCACTG |
| | | AGGCATTTTGCCTGC |
| SEQ ID | GI 345525588 NG_029933 Homo sapiens | TGCTCATCTACATCA |
| NO: 4294 | interleukin 16 | GGCTCAGCAAAGCAG |
| | (IL16), RefSeqGene on chromosome 15 | GCTCCTAGAACCAAG |
| | | GAAGTCCCTCCCCAC |
| SEQ ID | GI 256985178 NG_012796 Homo sapiens | CAAAAGGATCAACAT |
| NO: 4295 | glycogen phosphorylase L | GGCCCATCTCTGCAT |
| | (PYGL), RefSeqGene on chromosome 14 | TGTCGGTTCCCATGC |
| | | TGTGAATGGCGTGGC |
| SEQ ID | GI 193290120 NG_008160 Homo sapiens | GGAGAGATTCAGGGT |
| NO: 4296 | transaldolase 1 | AGAGCTTCGAGCTGA |
| | (TALD01), RefSeqGene on chromosome 11 | CTTCCACGTGGCCAG |
| | | TTTGTGGTCAGCGAG |
| SEQ ID | GI 46488017 AY601851 Homo sapiens | GTGAGTCAGCAGAAG |
| NO: 4297 | mutS homolog 2, colon | TGTCCATTGTGGACT |
| | cancer, nonpolyposis type 1 | GCATCTTAGCCCGAG |
| | (E. coli) | TAGGGGCTGGTGACA |
| | (MSH2) gene, complete cds | |
| SEQ ID | GI 68165954 DQ086801 Homo sapiens | TGGGTCTCCTTGTAT |
| NO: 4298 | suppressor of cytokine signaling 1 | TCCATCACCCTCCAC |
| | (SOCS1) gene, complete cds | AGAGTGTGGCCTCCA |
| | | GCAGATGTTCAGTGG |
| SEQ ID | GI 83026500 DQ309025 Homo sapiens | TCTTGGGGCCTCTAT |
| NO: 4299 | transforming growth factor | TTATCTGTCAGGGTC |
| | beta 1 induced transcript 1 | TCCGATGGGAGGGTC |
| | (TGFB1I1) gene, complete cds | TCCGAACCTGAGGTC |
| SEQ ID | GI 188219645 NG_007730 Homo sapiens | TCTCCAAAGCTGCCG |
| NO: 4300 | protein tyrosine phosphatase, | ATTGGTGACTGAATG |
| | receptor type C | CAGCTTTGGACCATG |
| | (PTPRC), RefSeqGene on chromosome 1 | CCCTGACACTGCATA |
| SEQ ID | GI 224494751 NM_138801 Homo sapiens | GCCAACCGAATCGCC |
| NO: 4301 | galactose mutarotase | AAAGGAACCTTCAAG |
| | (GALM), mRNA | GTGGATGGGAAGGAG |
| | | TATCACCTGGCCATT |
| SEQ ID | GI 982742415 NM_020530 Homo sapiens | AACCTGTTCCCCTCT |
| NO: 4302 | oncostatin M | GCTACTAGCCACTGA |
| | (OSM), transcript variant 1, mRNA | GAAGTGCACTTTAAG |
| | | AGGTGGGAGCTGGGC |
| SEQ ID | GI 1024846760 NG_046988 Homo sapiens | TGGAGGGGAAGATCA |
| NO: 4303 | E2F transcription factor 1 | GTCTGGTTTTGGTCC |
| | (E2F1), RefSeqGene on chromosome 20 | GGGTACTTTTGAGCA |
| | | GCCTGTGAGACCTCC |
| SEQ ID | GI 307746866 NG_027761 Homo sapiens | ATGGCAAGGAACCAT |
| NO: 4304 | heat shock protein family A | CCCGTGGCATAAACC |
| | (Hsp70) member 5 | CAGATGAAGCTGTAG |
| | (HSPA5), RefSeqGene on chromosome 9 | CGTATGGTGCTGCTG |
| SEQ ID | GI 323668281 NG_023034 Homo sapiens | GGGATTTGTGGGAGT |
| NO: 4305 | vascular cell adhesion molecule 1 | CTTGTAGTCCCAGCG |
| | (VCAM1), RefSeqGene on chromosome 1 | TTGTGTAGGAGTGGC |
| | | CTCACTGTGCTCTGT |
| SEQ ID | GI 19923714 NM_138284 Homo sapiens | GCCTTTCCATGGAGA |
| NO: 4306 | interleukin 17D | CTCGTAAGCAGCTTC |
| | (IL17D), mRNA | ATCTGACACGGGCAT |
| | | CCCTGGCTTGCTTTT |
| SEQ ID | GI 71274112 NM_005946 Homo sapiens | AGCTGCTGTGCCTGA |
| NO: 4307 | metallothionein 1A | TGTCCGGACAGCCCT |
| | (MT1A), mRNA | GCTCGAAGATATAGA |
| | | AAGAGTGACCTGCAC |
| SEQ ID | GI 1015809708 NM_003807 Homo sapiens | CAGATGAGGAACCTG |
| NO: 4308 | TNF superfamily member 14 | GACCCAGTTGGCTCA |
| | (TNFSF14), transcript variant 1, mRNA | AGTCCATGCAGGAAA |
| | | TGTGGGGGAAACCAG |
| SEQ ID | GI 188219645 NG_007730 Homo sapiens | CCCTTTCACCCTGGT |
| NO: 4309 | protein tyrosine phosphatase, | GTTGGCCTCCATCAG |
| | receptor type C | CTGTGTCTGGATTCT |
| | (PTPRC), RefSeqGene on chromosome 1 | GACAGTCTCTCCTGT |
| SEQ ID | GI 254939589 NG_012569 Homo sapiens | TCCCACGAACACCAC |
| NO: 4310 | toll like receptor 7 | GAACCTCACCCTCAC |
| | (TLR7), RefSeqGene on chromosome X | CATTAACCACATACC |
| | | AGACATCTCCCCAGC |
| SEQ ID | GI 95104789 NM_005860 Homo sapiens | GGAACAAGATCAACC |
| NO: 4311 | follistatin like 3 | TCCTCGGCTTCTTGG |
| | (FSTL3), mRNA | GCCTTGTCCACTGCC |
| | | TTCCCTGCAAAGATT |
| SEQ ID | GI 974987493 NG_012830 Homo sapiens | ACTCCTGCCAACCTT |
| NO: 4312 | DEAD-box helicase 3, X-linked | CCCTCATCCACTGTG |
| | (DDX3X), RefSeqGene on chromosome X | CTCCTATCATACCAG |
| | | CCGCCTTTCAATCCT |
| SEQ ID | GI 324711016 NG_012837 Homo sapiens | GTAGGTGAGGGCAGG |
| NO: 4313 | GC, vitamin D binding protein | AGAAGAAAGGCTGTC |
| | (GC), RefSeqGene on chromosome 4 | ATCCTGCCCATCTTG |
| | | GGAAGATAGCCCTCC |
| SEQ ID | GI 224809277 NG_011481 Homo sapiens | TGGGCTTGGCTGTTT |
| NO: 4314 | interleukin 18 receptor accessory protein | TCTGTGCACTGAGGT |
| | (IL18RAP), RefSeqGene on chromosome 2 | CAAGTGGAATTGCTT |
| | | GCTGTGCTTTGCGTT |
| SEQ ID | GI 343962600 NG_029791 Homo sapiens | ACCTTTGCCCCTGAC |
| NO: 4315 | TNF receptor superfamily member 1B | TTTCTCCATGGACCA |
| | (TNFRSF1B), RefSeqGene on chromosome 1 | CGGACAAGTGACTTG |
| | | ATCTCCCTGAGCTGT |
| SEQ ID | GI 345199309 NM_002167 Homo sapiens | ATCCCTTCCTGGAGA |
| NO: 4316 | inhibitor of DNA binding 3, HLH protein | CTAAACCTGGTGCTC |
| | (ID3), mRNA | AGGAGCGAAGGACTG |
| | | TGAACTTGTGGCCTG |
| SEQ ID | GI 4885488 NM_005372 Homo sapiens | ACCGCGGTGTTCCTG |
| NO: 4317 | MOS proto-oncogene, serine/threonine kinase | TGGCCATAAAGCAAG |
| | (MOS), mRNA | TGAACAAGTGCACCA |
| | | AGAACCGACTAGCAT |
| SEQ ID | GI 18653445 AF479264 Homo sapiens | ACAAGGAGTGGCATG |
| NO: 4318 | ligase IV, DNA, ATP-dependent | AGTGCATGACCCTGG |
| | (LIG4) gene, complete cds | ACGACCTAGAACAAC |
| | | TTAGGGGGAAGGCAT |
| SEQ ID | GI 401782607 NG_032906 Homo sapiens | AGCATGAGCCCCGAA |
| NO: 4319 | coagulation factor II thrombin receptor | GGGCAGAACTGTGAG |
| | (F2R), RefSeqGene on chromosome 5 | TCAAAACCATGTGTG |
| | | TCATGGAATGCTGGT |
| SEQ ID | GI 405778361 NG_032938 Homo sapiens | GCAAAGGAATAGACT |
| NO: 4320 | semaphorin 3B | TGCAGAGCTAGCAAT |
| | (SEMA3B), RefSeqGene on chromosome 3 | GAAAAGGGGGCCTGG |
| | | ACTGTCAGGGGCCAG |
| SEQ ID | GI 169646347 NM_001115152 Homo sapiens | AGCATGCTGGGGACC |
| NO: 4321 | CD300 molecule like family member d | GTCCTCTGGGTAAAC |
| | (CD300LD), mRNA | AGACCACAAAGAAGG |
| | | TCTTGAAGGAGGAGG |
| SEQ ID | GI 208431777 NM_001135638 Homo sapiens | GGAGCCAGGCGTTCA |
| NO: 4322 | phosphatidylinositol-4- | CCTTGGTCGTCCTGA |
| | phosphate 5-kinase type 1 alpha | TGTTTTACCTCAGAC |
| | (PIP5K1A), transcript variant 1, [symbol] | TCCACCTTTGGAGGA |
| SEQ ID | GI 1049010865 AH002678 Homo sapiens | TGCTTCCTCTTCCTT |
| NO: 4323 | isolate Patient with P-450(C21) | TGAAGCATCATCAGT |
| | deficiency membrane protein | AGTCACACCCTCACA |
| | (CD3E) gene, complete cds | GCTGGCCTGCCCTCT |
| SEQ ID | GI 224809232 NG_011437 Homo sapiens | AAGCCTTCAAAGGCC |
| NO: 4324 | arachidonate 5-lipoxygenase | AGGCAGCCACCGTAA |
| | (ALOX5), RefSeqGene on chromosome 10 | TAAGAGAAAGCCACT |
| | | GCTTCTGCCATGACA |
| SEQ ID | GI 193794854 NG_008178 Homo sapiens | CCAGCTCCTGGTACT |
| NO: 4325 | glycerol kinase | TCCTCAGGTATTGGT |
| | (GK), RefSeqGene on chromosome X | GCTCTGGCTATTGCT |
| | | CACTTCCCAGCCTCC |
| SEQ ID | GI 297632354 NG_007470 Homo sapiens | AAGCTCTGCTTCTGG |
| NO: 4326 | glycophorin A | AAGAGCAAGGGCTCC |
| | (MNS blood group) | CCTCTCCCTTTCATG |
| | (GYPA), RefSeqGene on chromosome 4 | CAGTTTCTAGGAGCA |
| SEQ ID | GI 674651085 NG_012882 Homo sapiens | AAGCTCAAGGGCATG |
| NO: 4327 | toll like receptor 8 | CCAGGCAAAGGCCTT |
| | (TLR8), RefSeqGene on chromosome X | TTTTCTGGCAGCTTG |
| | | AACTTGTCTCAGCAG |
| SEQ ID | GI 214832245 NM_017853 Homo sapiens | ATGACCTGGGATGCC |
| NO: 4328 | thioredoxin like 4B | TAACTGTCTACTCCC |
| | (TXNL4B), transcript variant 1, mRNA | TGCAAGCCTCAGAGC |
| | | AGCCAAGTCATTGGT |
| SEQ ID | GI 1025608653 NG_047027 Homo sapiens | TTCCGTGATTTGCTT |
| NO: 4329 | Jun proto-oncogene, AP-1 | GCTTCACACTGTGGT |
| | transcription factor subunit | AGCCTGGCCACGAAA |
| | (JUN), RefSeqGene on chromosome | GAACCAGGATTCCCG |
| SEQ ID | GI 684179348 NG_034249 Homo sapiens | TCGTGTGATGTGTGT |
| NO: 4330 | transmembrane protein 173 | GCTGCCTTTGGCTGA |
| | (TMEM173), RefSeqGene on chromosome 5 | GTGTGTGGAGTCCTG |
| | | CTCAGGTGTTAGGTA |
| SEQ ID | GI 23510408 NM_003057 Homo sapiens | AATGCTGAGCTGTAC |
| NO: 4331 | solute carrier family 22 member 1 | CCCACATTCGTCAGG |
| | (SLC22A1), transcript variant 1, mRNA | AACCTCGGAGTGATG |
| | | GTGTGTTCCTCCCTG |
| SEQ ID | GI 83699680 DQ314887 Homo sapiens | GGGATGAGCTCAGGG |
| NO: 4332 | v-rel reticuloendotheliosis viral | TTTAGGCACACAGCT |
| | oncogene homolog B, nuclear | CAGGATGTATACGGA |
| | factor of kappa light polypeptide [symbol] | GGCTACACTGCTGCC |
| SEQ ID | GI 974987490 NG_016453 Homo sapiens | TCAGCCACAGAGAGG |
| NO: 4333 | transient receptor potential | GGGCCGAATGGGTTG |
| | cation channel subfamily M member 1 | CTGTTTTTGCAGTTG |
| | (TRPM1), RefSeqGene Or [symbol] | AATGCAAACGCTTTT |
| SEQ ID | GI 282721038 NG_016269 Homo sapiens | ACCATGCGTAAGAGC |
| NO: 4334 | adenylate kinase 2 | AGTTTGTCTGCAGTG |
| | (AK2), RefSeqGene on chromosome 1 | GTGCAGGACGTAAAC |
| | | ACAGGGCACTTGTGG |
| SEQ ID | GI 300388175 NG_011471 Homo sapiens | ACGTCACTTACTCCC |
| NO: 4335 | purinergic receptor P2X 7 | CACTCTGTCATCCTT |
| | (P2RX7), RefSeqGene on chromosome 12 | CTATCTGCAGTATCC |
| | | CACCCGCAGGACGCT |
| SEQ ID | GI 166706752 EU332835 Homo sapiens | TATCACCGAGGACAG |
| NO: 4336 | v-akt murine thymoma viral | CTGCTCTGATTCTGA |
| | oncogene homolog l | AGTGTGAACGCCTGC |
| | (AKT1) gene, complete cds | GTACGGCTGATGCTG |
| SEQ ID | GI 50234986 AY675319 Homo sapiens | ATTATGAGCCTCCAT |
| NO: 4337 | transforming growth factor, | TTGGTTCCAAGGTGC |
| | beta receptor II | GGGAGCACCCCTGTG |
| | (70/80 kDa)(TGFBR2) gene, complete cds | TCGAAAGCATGAAGG |
| SEQ ID | GI 86278451 DQ374395 Homo sapiens | ATTTTGCATCTCAGG |
| NO: 4338 | UDP glucuronosyltransferase | TCACCCGATGACCCG |
| | 1 family, polypeptide A1 | TGCCTTTATCACCCA |
| | (UGT1A1) gene, complete cds | TGCTGGTTCCCATGG |
| SEQ ID | GI 209447076 NG_008726 Homo sapiens | CAGCCCTAGGAAACA |
| NO: 4339 | paraoxonase 3 | CATGCAGTGAGGGAG |
| | (PON3), RefSeqGene on chromosome 7 | GTACAGCAAAGGCGT |
| | | CATTAAGCCAACCGC |
| SEQ ID | GI 807045929 NG_029892 Homo sapiens | AATCACCATGGCCAA |
| NO: 4340 | potassium voltage-gated | CCCTCAATGCAAAGA |
| | channel subfamily J member 6 | GGATGAGAAATGTGG |
| | (KCNJ6), RefSeqGene on chromosor [symbol] | TCCAGCCCTGGGAGG |
| SEQ ID | GI 193290120 NG_008160 Homo sapiens | TCAGAAGTTCTGGAG |
| NO: 4341 | transaldolase 1 | CCCAGACTTGTGACG |
| | (TALD01), RefSeqGene on chromosome 11 | GGTGGGAATGGAGAA |
| | | TGGTTGGTTGGGACT |
| SEQ ID | GI 364023822 NM_130898 Homo sapiens | TGGCTTTGCTTCCCA |
| NO: 4342 | cAMP responsive element | CTGGGATTCCTACTT |
| | binding protein 3 like 4 | AGGTGTCTGCCCTCA |
| | (CREB3L4), transcript variant 1, mRNA | GGGGTCCAAATCACT |
| SEQ ID | GI 930697465 NM_005564 Homo sapiens | TCATCCGCTTCTCCA |
| NO: 4343 | lipocalin 2 | AATCTCTGGGCCTCC |
| | (LCN2), mRNA | CTGAAAACCACATCG |
| | | TCTTCCCTGTCCCAA |
| SEQ ID | GI 227908772 NG_011947 Homo sapiens | AGGATGAGGGCACAC |
| NO: 4344 | tryptophan hydroxylase 1 | AAGGAAAGACAAGGT |
| | (TPH1), RefSeqGene on chromosome 11 | GGTGCTTGGTGTGTC |
| | | TGGGGAAACAGCAAG |
| SEQ ID | GI 315434256 NM_001926 Homo sapiens | CCAAGGCTGAGCCAC |
| NO: 4345 | defensin alpha 6 | TCCAAGCTGAGGATG |
| | (DEFA6), mRNA | ATCCACTGCAGGCAA |
| | | AAGCTTATGAGGCTG |
| SEQ ID | GI 54112075 AY771350 Homo sapiens | AATCTCCAGTGGCAT |
| NO: 4346 | heme oxygenase | CTGCAATGTGGGTAT |
| | (decycling) 2 | TCTAGCCTCCAGTGC |
| | (HMOX2) gene, complete cds | TCACGTGGCTCACCT |
| SEQ ID | GI 352962130 NG_030351 Homo sapiens | AGGTTGGACAGAGGC |
| NO: 4347 | eukaryotic translation | AGTTGGGAGTTCAGG |
| | initiation factor 2 alpha kinase 2 | AGAGAGTCCATGGTG |
| | (EIF2AK2), RefSeqGene on chromoso [symbol] | GAAGCGTGCTTTTGA |
| SEQ ID | GI 538917457 NM_005896 Homo sapiens | GGAGACGTCCACCAA |
| NO: 4348 | isocitrate dehydrogenase | TCCCATTGCTTCCAT |
| | (NADP(+)) 1, cytosolic | TTTTGCCTGGACCAG |
| | (IDH1), transcript variant 1, mRNA | AGGGTTAGCCCACAG |
| SEQ ID | GI 50345287 AY682848 Homo sapiens | GCCAATGACGACACA |
| NO: 4349 | receptor(TNFRSF)- | GACCAGCAAAGCAGA |
| | interacting serine-threonine kinase 1 | ACCGAGACTGTCCGC |
| | (RIPK1) gene, complete cds | ACTTGGTTCGGAAAC |
| SEQ ID | GI 1154491910 NG_052982 Homo sapiens | ACCCACACAGAGTGT |
| NO: 4350 | ubiquitin conjugating enzyme E2 G2 | CATGGGTGACAGTTT |
| | (UBE2G2), RefSeqGene on chromosome 21 | CTGGTTGAAGTAGCT |
| | | CCACGCCTGGCTTCT |
| SEQ ID | GI 436408720 NM_014226 Homo sapiens | GGAACAAATGGAAGA |
| NO: 4351 | MOK protein kinase | GTGCCGGTGCTGAGA |
| | (MOK), transcript variant 1, mRNA | CCCTTGAAGTGCATC |
| | | CCTGCGAGCAAGAAG |
| SEQ ID | GI 21634442 AF274025 Homo sapiens | GACCTATGCTGTGGT |
| NO: 4352 | GTP-binding protein Rab25 mRNA, | GGAGCGATGGCTGAA |
| | complete cds | GGAGCTCTATGACCA |
| | | TGCTGAAGCCACGAT |
| SEQ ID | GI 11691883 AB034990 Homo sapiens | CTCGTAAGGAGCACA |
| NO: 4353 | HERPUD1 gene for stress | GCCTAGTTCCCTTGC |
| | protein Herp, complete cds | GTGCACAGTTCACAA |
| | | TAGGGTTCGGCTCCT |
| SEQ ID | GI 313747578 NM_015162 Homo sapiens | AAACCAGCTCACTGA |
| NO: 4354 | acyl-CoA synthetase | CTGACAGGCAGCCAC |
| | bubblegum family member 1 | TCTCCAAAGAGTCCC |
| | (ACSBG1), transcript variant 1, mRNA | TGAACCATGCTCTCG |
| SEQ ID | GI 94538326 NM_002038 Homo sapiens | TGCCCTGATGGGCTA |
| NO: 4355 | interferon alpha inducible protein 6 | CGCCACCCACAAGTA |
| | (IFI6), transcript variant 1, mRNA | TCTCGATAGTGAGGA |
| | | GGATGAGGAGTAGCC |
| SEQ ID | GI 802084027 NM_006236 Homo sapiens | CACACCTCCACCTCC |
| NO: 4356 | POU class 3 homeobox 3 | ACCAATGCACTCTTC |
| | (POU3F3), mRNA | TTCCTCCTCCTTCTC |
| | | CAGACAACTGCTGGG |
| SEQ ID | GI 571026712 NG_033872 Homo sapiens | ATGAACAGCCAAGTG |
| NO: 4357 | cytochrome cl | TTAAGGTGTTGAACC |
| | (CYC1), RefSeqGene on chromosome 8 | ACTTGGCCCCCATTC |
| | | TGATGGCAGCAGGGA |
| SEQ ID | GI 238018065 NG_012195 Homo sapiens | AATGGGCACAGGGGA |
| NO: 4358 | fatty acid amide hydrolase | AGCAGAGATATAGGT |
| | (FAAH), RefSeqGene on chromosome 1 | GAGGACAGATCAAGG |
| | | TGGACTTGGGCAGCC |
| SEQ ID | GI 238028972 NG_011992 Homo sapiens | ACAAGGAAGGCACAT |
| NO: 4359 | nitric oxide synthase 3 | CCTGGCTGACCAAGA |
| | (NOS3), RefSeqGene on chromosome 7 | GGTTAGACTGTGCTC |
| | | GGGCACTGACAAGAA |
| SEQ ID | GI 574584717 NM_001289177 Homo sapiens | TGTCGGAAGGCTGCA |
| NO: 4360 | acyl-CoA synthetas | AAATCCTTGATCAAG |
| | e bubblegum family member 2 | CTGGGTTTGGAGCGT |
| | (ACSBG2), transcript variant 1, mRNA [symbol] | TTCCACGGAGTTGGT |
| SEQ ID | GI 728797213 LN680437 Homo sapiens | ATCCTCGCTGTGGTT |
| NO: 4361 | mRNA for CD47 | GGACTGAGTCTCTGT |
| | | ATTGCGGCGTGTATA |
| | | CCAATGCATGGCCCT |
| SEQ ID | GI 325495520 HQ692855 Homo sapiens | CAGCACCTTCATGGA |
| NO: 4362 | nerve growth factor | CGGCTACACAGGAGA |
| | IB nuclear receptor variant 1 | GTTTGACACCTTCCT |
| | (NR4A1) mRNA, complete cds | CTACCAGCTGCCAGG |
| SEQ ID | GI 61743979 NM_017564 Homo sapiens | TGTTTCTGTGGGTGA |
| NO: 4363 | stabilin 2 | GAGATGTGTTGCTGT |
| | (STAB2), mRNA | GCCCACCCAGTACAG |
| | | CTTCCTCCTCTGACC |
| SEQ ID | GI 1026191091 NG_047061 Homo sapiens | TCCCGCCTGTTTTCT |
| NO: 4364 | marker of proliferation Ki-67 | TTCTGACTCTATCTG |
| | (MKI67), RefSeqGene on chromosome 10 | GCAGCCCGATGCCAC |
| | | CCAGTACAGGAAGTG |
| SEQ ID | GI 238776809 NG_012246 Homo sapiens | CCTGGGACGTGACTT |
| NO: 4365 | N-acetyltransferase 2 | TCGAAAGTGCTTCTC |
| | (NAT2), RefSeqGene on chromosome 8 | AGCATCCATTCCCCC |
| | | CTCCCCTCCACTTAG |
| SEQ ID | GI 1142736558 NG_052842 Homo sapiens | TCCTCCAAGCATCTC |
| NO: 4366 | pyruvate dehydrogenase | TAGCACAGAGACCCT |
| | phosphatase regulatory subunit | GTTTTCTCCCCTTGT |
| | (PDPR), RefSeqGene on chromos [symbol] | AATGGGCCAGTGCCC |
| SEQ ID | GI 238814317 NG_012266 Homo sapiens | CGGAGCTGGGTATCT |
| NO: 4367 | X-box binding protein 1 | CAAATCTGCTTTCAT |
| | (XBP1), RefSeqGene on chromosome 22 | CCAGCCACTGCCCAA |
| | | AGCCATCTTCCTGCC |
| SEQ ID | GI 70995210 NM_001398 Homo sapiens | ATGTGGCCCGGATCA |
| NO: 4368 | enoyl-CoA hydratase 1 | GCTGGTACCTCCGTG |
| | (ECH1), mRNA | ACATCATCACTCGAT |
| | | ACCAGGAGACCTTCA |
| SEQ ID | GI 908212441 NG_042288 Homo sapiens | AGGATGGCAGGTTTG |
| NO: 4369 | methylsterol monooxygenase 1 | GGCAGAGAGAAAAGT |
| | (MSM01), RefSeqGene on chromosome 4 | TGGGTGGCAGTGCAG |
| | | TCATCACACAACCAA |
| SEQ ID | GI 1047600468 NM_001718 Homo sapiens | GCGCGGAGTTCGTGA |
| NO: 4370 | bone morphogenetic protein 6 | GCGAGAAGGAAGTTA |
| | (BMP6), mRNA | AACCTCGCGGAATAG |
| | | ACTGGCATTTCGGGA |
| SEQ ID | GI 195976780 NM_005201 Homo sapiens | AAATGCCTAGGGAGA |
| NO: 4371 | C-C motif chemokine receptor 8 | GCTGTGAAAAGTCAT |
| | (CCR8), mRNA | CATCCTGCCAGCAGC |
| | | ACTCCTCCCGTTCCT |
| SEQ ID | GI 574957130 NM_001815 Homo sapiens | TGGTGTGTTTCCTGC |
| NO: 4372 | carcinoembryonic antigen | TCCTTGCCAAAACTG |
| | related cell adhesion molecule 3 | GAAGAACCAGCATCC |
| | (CEACAM3), transcript variant 1 [symbol] | AGCGTGACCTCAAGG |
| SEQ ID | GI 1008909437 NG_023257 Homo sapiens | AGGGCCCAAGGTCTC |
| NO: 4373 | lactotransferrin | CCATCTGCCAAGCTA |
| | (LTF), RefSeqGene on chromosome 3 | TTGTCCAAGCGTGAG |
| | | TTGATGTCTCAGGAA |
| SEQ ID | GI 195927007 NM_052813 Homo sapiens | AGTCAGGCCTGACTC |
| NO: 4374 | caspase recruitment domain family member 9 | AGCTGCTGATGACTG |
| | (CARD9), transcript variant 1, mRNA | AGGTCATGAAGCTGC |
| | | AGAAGAAGGTGCAGG |
| SEQ ID | GI 292494880 NG_007148 Homo sapiens | CTCCTGCTTTCTCAC |
| NO: 4375 | ATPase phospholipid transporting 8B1 | TGAGACTGTGCAGAT |
| | (ATP8B1), RefSeqGene on chromosome 18 | TGTGTGGGTGGCGAG |
| | | TTGGTTGTGCAAGGC |
| SEQ ID | GI 327180724 NG_028256 Homo sapiens | TAGAGGGCATCGTGA |
| NO: 4376 | mitogen-activated protein kinase kinase 3 | GGCTCAGAGAGGTTA |
| | (MAP2K3), RefSeqGene on chromosome 17 | AGTGACTTGCTGAGG |
| | | GTCACACAGCAGGGA |
| SEQ ID | GI 211904121 NG_008930 Homo sapiens | TAGGCCAGGGTGGAG |
| NO: 4377 | cytochrome p450 oxidoreductase | GCACTGTTTTCAAGA |
| | (POR), RefSeqGene on chromosome 7 | ACAGGAGTGTTCCCA |
| | | CAGGTGACCCTTTCT |
| SEQ ID | GI 1128611453 NM_019058 Homo sapiens | AGGCAGCCACCTAAG |
| NO: 4378 | DNA damage inducible transcript 4 | GTGGAGGTGGGGGAA |
| | (DDIT4), mRNA | TAGTGTTTCCCAGGA |
| | | AGCTCATTGAGTTGT |
| SEQ ID | GI 57790279 AY865620 Homo sapiens | TCAGAGGACACCTGA |
| NO: 4379 | signal transducer and | GTCCGTGAACACCTT |
| | activator of transcription 1, 91 kDa | TGCAAAGCCTTCTTG |
| | (STAT1) gene, complete cds | GGGTGTGAGGGAAGT |
| SEQ ID | GI 927028873 NM_004836 Homo sapiens | AATGGACCAGGATGA |
| NO: 4380 | eukaryotic translation | GGAAGAGCAGACGGT |
| | initiation factor 2 alpha kinase 3 | TCTGACCCCAATGCC |
| | (EIF2AK3), transcript | AGCTTATGCCAGACA |
| | variant 1, mRN [symbol] | |
| SEQ ID | GI 1015637181 AH000040 Homo sapiens | TCCATGTGCCCCCTC |
| NO: 4381 | hematopoietic stem cell antigen | TACCATTTGCAGAGT |
| | (CD34) gene, complete cds | CCTGCACAGTTTTCT |
| | | GGCTGGAGCCTAGAA |
| SEQ ID | GI 18653447 AF478696 Homo sapiens | AGTGCGCTCATTACA |
| NO: 4382 | coagulation factor II | GCCTTACAGTAACCA |
| | (thrombin) | GGTGGGGGGTAAGGT |
| | (F2) gene, complete cds | CCTGTGCCCATTTCA |
| SEQ ID | GI 45505189 AY572796 Homo sapiens | TGTAGTGACAGCACC |
| NO: 4383 | signal transducer and | ACTGCCTCTGTTTCC |
| | activator of transcription 3 | CTTCCTCTTGTGATG |
| | (acute-phase response factor) | GCAGCAGCGTCTCAA |
| | (STAT3) gene, [symbol] | |
| SEQ ID | GI 189217867 NG_007938 Homo sapiens | AGGTTTACCCCTGGA |
| NO: 4384 | cytochrome P450 family 3 | GGGAAAGTCACAAGC |
| | subfamily A member 5 | TCATGTCCAGAAGGC |
| | (CYP3A5), RefSeqGene on chromosome 7 | CAGTAGCAGCAAGCT |
| SEQ ID | GI 381140032 NG_032168 Homo sapiens | GTGCCCCATCAGTTC |
| NO: 4385 | glycerol-3-phosphate dehydrogenase 1 | ATCGGCAAGATCTGT |
| | (GPD1), RefSeqGene on chromosome 12 | GACCAGCTCAAGGGC |
| | | CATCTGAAGGCAAAC |
| SEQ ID | GI 325995139 NG_008854 Homo sapiens | AGCTTGGGGACCTCA |
| NO: 4386 | potassium voltage-gated | GGATCTTGCCCCAAG |
| | channel subfamily Q member 3 | TCACAGAACTAAGGA |
| | (KCNQ3), RefSeqGene on chromos [symbol] | ATTGGCAGAGCCAGT |
| SEQ ID | GI 1139349906 NG_052802 Homo sapiens | GTGACCATTTGGACC |
| NO: 4387 | NLR family pyrin domain containing 4 | GCCTTTTTGCTCCCA |
| | (NLRP4), RefSeqGene on chromosome 19 | AGGAAGCTGGGAAAC |
| | | AGCCACGTACAGTGA |
| SEQ ID | GI 341865607 NG_029555 Homo sapiens | ATGGCTGCCATCTGT |
| NO: 4388 | ETS proto-oncogene 1, | TAGGACAATCATGAC |
| | transcription factor | ACACATACTGAGGCT |
| | (ETS1), RefSeqGene on chromosome 11 | GCCCCGTCTCCTGGG |
| SEQ ID | GI 1013417860 NG_046847 Homo sapiens | TAGCATGAACGCAGC |
| NO: 4389 | ubiquitin specific peptidase 7 | CACAGACAACAATTG |
| | (USP7), RefSeqGene on chromosome 16 | AGTGGCGAGGCTGTC |
| | | CCCACAAAGCTTTGT |
| SEQ ID | GI 78190493 NM_013434 Homo sapiens | TCCATGGCAGGAAGG |
| NO: 4390 | potassium voltage-gated | CGGGGGATTTCAAGT |
| | channel interacting protein 3 | TTAGGGATTGGGTCG |
| | (KCNIP3), transcript variant 1, mRNA | TGGTGGAGAATCTGA |
| SEQ ID | GI 478431032 NM_003693 Homo sapiens | ATGTTGTACCCATCT |
| NO: 4391 | scavenger receptor class F member 1 | CCAGGCCACCAGAAC |
| | (SCARF1), transcript variant 1, mRNA | CCTGATGACCTTGAA |
| | | TTTGGGGAGTGGGGA |
| SEQ ID | GI 83699680 DQ314887 Homo sapiens | CGAGGCTTCTGCCAT |
| NO: 4392 | v-rel reticuloendotheliosis viral | TTTCAGTTCGCCAAC |
| | oncogene homolog B, nuclear | TCATGGTGCAAGGTG |
| | factor of kappa light | GCTGTTGTAGCTCCA |
| | polypeptide [symbol] | |
| SEQ ID | GI 342187247 NG_029422 Homo sapiens | GTGGGGACAGGGAAG |
| NO: 4393 | major histocompatibility | GTGGCTGTTGGACAG |
| | complex, class 1, C | GAGTTGTCAATGTGT |
| | (HLA-C), RefSeqGene on chromosome 6 | GCCTTGTTGCAAAGA |
| SEQ ID | GI 167860125 NM_002639 Homo sapiens | TGGTTGGCACTAGAC |
| NO: 4394 | serpin family B member 5 | TGGTGGCAGGGGCTT |
| | (SERPINB5), mRNA | CTAGCTGACTTGCAC |
| | | AGGGATTCTCACAAT |
| SEQ ID | GI 769468216 NM_003246 Homo sapiens | GACCCACGAATGATG |
| NO: 4395 | thrombospondin 1 | CCTTGGGTGGGCAAC |
| | (THBS1), mRNA | ACGATTGCATGTTGT |
| | | GGAGACACTTCGGAA |
| SEQ ID | GI 341865606 NG_029554 Homo sapiens | AGGAATTTGAACACA |
| NO: 4396 | Fc fragment of IgE receptor II | GGTAGTGTGGGTCAG |
| | (FCER2), RefSeqGene on chromosome 19 | GCATCTGCAGCCCTA |
| | | GCCACTATGCCACCT |
| SEQ ID | GI 1049010865 AH002678 Homo sapiens | GTGATGTCGGTGGCC |
| NO: 4397 | isolate Patient with P-450(C21) | ACAATTGTCATAGTG |
| | deficiency membrane protein | GACATCTGCATCACT |
| | (CD3E) gene, complete cds | GGGGGCTTGCTGCTG |
| SEQ ID | GI 684179348 NG_034249 Homo sapiens | ACTTCCCACCCCAAG |
| NO: 4398 | transmembrane protein 173 | GGAACTCAAAGCTTG |
| | (TMEM173), RefSeqGene on chromosome 5 | TGTCAAGGCCAAGGA |
| | | AAAATTCCCCCTCCG |
| SEQ ID | GI 1021312320 NM_001323565 Homo sapiens | GTTCGACCAGTACAG |
| NO: 4399 | cysteine dioxygenase type 1 | TCGTGGTCGTGGTTT |
| | (CD01), transcript variant 1, mRNA | GCAGTTTGTTGTTGG |
| | | TGGTGGCAGTGGTGG |
| SEQ ID | GI 16118554 AF398885 Homo sapiens | AGACATCTCGATCCT |
| NO: 4400 | ELMOl mRNA, complete cds | GCAGCGGTCCTTGGC |
| | | CATTTTGGAGTCGAT |
| | | GGTGCTCAATAGCCA |
| SEQ ID | GI 164696344 AK313967 Homo sapiens | TGCCGACCTGAAAAT |
| NO: 4401 | cDNA, FLI94614, Homo sapiens | GGAGAGGAGCACACC |
| | interleukin 18 receptor 1 | TTTGCTGTGGAGATT |
| | (IL18R1), mRNA | TTGCCCAGGGTGTTG |
| SEQ ID | GI 49574519 NM_052972 Homo sapiens | AGCGACCAAAAAGCC |
| NO: 4402 | leucine rich alpha-2-glycoprotein 1 | CAGGGGGCATTCAAC |
| | (LRG1), mRNA | CCCATGTTTCTAGAA |
| | | CTCTGTTCCTGCTGC |
| SEQ ID | GI 11545840 NM_022120 Homo sapiens | GGGGGACACATCCAA |
| NO: 4403 | 3-oxoacid CoA-transferase 2 | CTAACCATGCTTGGA |
| | (OXCT2), mRNA | GCCATGCAGGTTTCC |
| | | AAATACGGCGACCTG |
| SEQ ID | GI 22128580 AF533019 Homo sapiens | GCTGGCGTCTGCATA |
| NO: 4404 | growth arrest and DNA- | CGAGAGACTTGGTTG |
| | damage-inducible, beta | AACTTGGTTGGTCCT |
| | (GADD45B) gene, complete cds | TGTCTGCACCCTCGA |
| SEQ ID | GI 238018096 NG_012212 Homo sapiens | AAGCTCCCGAGTCTT |
| NO: 4405 | C-C motif chemokine ligand 11 | TTCCCCACATTCAAG |
| | (CCL11), RefSeqGene on chromosome 17 | AGGGTTGCTGGGTGC |
| | | ATCCATACCCAGCTA |
| SEQ ID | GI 1028908926 NG_050619 Homo sapiens | TTGGGAGGGGAGAGA |
| NO: 4406 | fatty acid binding protein 7 | GAAGGGCAGGGAATA |
| | (FABP7), RefSeqGene on chromosome 6 | TCAAGTCGGATTCTC |
| | | CTGCTCTGTCCCCAG |
| SEQ ID | GI 520975386 NM_001278651 Homo sapiens | TGGCAGTGCAGGATG |
| NO: 4407 | Ran GTPase activating protein 1 | CAGTAGATGCCCTGA |
| | (RANGAP1), transcript variant 1, mRNA | TGCAGAAGGCTTTCA |
| | | ACTCCTCGTCCTTCA |
| SEQ ID | GI 1068937310 NG_008847 Homo sapiens | ACAGCTTTAACCTCC |
| NO: 4408 | glucokinase | AGCCTTGTTTCTTCA |
| | (GCK), RefSeqGene on chromosome 7 | TGGTTGCAGGGTGGC |
| | | TATCACAGCGCTGGC |
| SEQ ID | GI 291084831 NG_016755 Homo sapiens | TCAGGGCACCTTTCA |
| NO: 4409 | succinate-CoA ligase alpha subunit | CAGCCAGCAGGCATT |
| | (SUCLG1), RefSeqGene on chromosome 2 | GGAATATGGCACCAA |
| | | ACTCGTTGGAGGAAC |
| SEQ ID | GI 974005408 NM_015133 Homo sapiens | tGCACCAGCATCTACA |
| NO: 4410 | mitogen-activated protein | GGACGTGGACATTGA |
| | kinase 8 interacting protein 3 | GCCCTACGTCAGCAA |
| | (MAPK8IP3), transcript variant 1, i | GATGCTAGGCACTGG |
| SEQ ID | GI 954170001 NM_002620 Homo sapiens | CCACTGCCCCACTGC |
| NO: 4411 | platelet factor 4 variant 1 | CCAACTCATAGCCAC |
| | (PF4V1), mRNA | GCTGAAGAATGGGAG |
| | | GAAAATTTGCTTGGA |
| SEQ ID | GI 834400732 NG_042181 Homo sapiens | GGGGCTTGTGAGAGC |
| NO: 4412 | collagen type XII alpha 1 chain | TTTCTTCACTCAAGA |
| | (COL12A1), RefSeqGene on chromosome 6 | CCCTCACAGTTCACA |
| | | CTGGGGCCAGCCTTA |
| SEQ ID | GI 27805154 AY217549 Homo sapiens | GCTGGGCCAAAGGGG |
| NO: 4413 | mutL homolog 1, colon | AGGGGGAATGAAAAG |
| | cancer, nonpolyposis type 2 | AGTGTTTCTGGCAGA |
| | (E. coli) | GGAAATGGCAAGGAT |
| | (MLH1) gene, complete cds | |
| SEQ ID | GI 1063759771 NG_051548 Homo sapiens | TGTAGCTGGACCAGC |
| NO: 4414 | mitogen-activated protein | AGGAGGATTCAGGGT |
| | kinase-activated protein kinase 3 | GAGAGGTATGGACCA |
| | (MAPKAPK3), RefSeqGene on [symbol] | GAGCGTTGTGTGTGA |
| SEQ ID | GI 256985178 NG_012796 Homo sapiens | TACCCAGTGATGTCA |
| NO: 4415 | glycogen phosphorylase L | GAGCATGAGTCCAGA |
| | (PYGL), RefSeqGene on chromosome 14 | TGTGCTCTGTGCGTG |
| | | CATGGGATGGCTTCC |
| SEQ ID | GI 82880650 NM_004051 Homo sapiens | TCCTTGTGTTTGCTG |
| NO: 4416 | 3-hydroxybutyrate dehydrogenase 1 | GCTGCTTGATGAAGG |
| | (BDH1), transcript variant 1, mRNA | ACAAAGGCCATGATG |
| | | GGGTCAAGGAGCTGG |
| SEQ ID | GI 84043962 NM_015904 Homo sapiens | ACATGTCCCCACAGT |
| NO: 4417 | eukaryotic translation initiation | TCCAATGTGCCTGTT |
| | factor 5B | CACTCACCTCTCCCT |
| | (EIF5B), mRNA | TCCCCAACCCTTCTC |
| SEQ ID | GI 161377466 NM_003914 Homo sapiens | GGAGACCGGCTTTCC |
| NO: 4418 | cyclin A1 | CGCAATCATGTACCC |
| | (CCNA1), transcript variant 1, mRNA | TGGATCTTTTATTGG |
| | | GGGCTGGGGAGAAGA |
| SEQ ID | GI 666335577 NM_006494 Homo sapiens | AGGCGAGTCGGAGGA |
| NO: 4419 | ETS2 repressor factor | GGTAGAGGTGACTGA |
| | (ERF), transcript variant 1, mRNA | CATCAGTGATGAGGA |
| | | TGAGGAAGACGGGGA |
| SEQ ID | GI 14278713 AF377330 Homo sapiens | TCACGAAACAGTGGC |
| NO: 4420 | urokinase-type plasminogen activator | CACACAAATGTGAGG |
| | (PLAU) gene, complete cds | TGGGGTTGGAAGGAG |
| | | ACCCTGTCCAGTCTT |
| SEQ ID | GI 401709981 NG_032894 Homo sapiens | CTCCTCCTGGAGCTG |
| NO: 4421 | F2R like thrombin or trypsin receptor 3 | GGTGTTGACTCTGTC |
| | (F2RL3), RefSeqGene on chromosome 19 | CAAGACTCTGCTCAG |
| | | TCACTTCCTGGCTGA |
| SEQ ID | GI 31317227 NM_004430 Homo sapiens | GCCGGCGTTGGACAG |
| NO: 4422 | early growth response 3 | CAATCTCTTCCCCAT |
| | (EGR3), transcript variant 1, mRNA | GATTCCTGACTACAA |
| | | CCTCTACCACCACCC |
| SEQ ID | GI 45238846 NM_006142 Homo sapiens | GGGCGAGGAGCTCTC |
| NO: 4423 | stratifin | CTGCGAAGAGCGAAA |
| | (SFN), mRNA | CCTGCTCTCAGTAGC |
| | | CTATAAGAACGTGGT |
| SEQ ID | GI 564730481 NM_001287262 Homo sapiens | CCACTGGCCAGCATC |
| NO: 4424 | butyrophilin like 10 | TGTCAAAACTGAGGG |
| | (BTNL10), mRNA | ACAGACTCCTGTGCA |
| | | AGTCGAGGGAAAGCT |
| SEQ ID | GI 217416377 NM_138394 Homo sapiens | TCACCCGTCGTCCAT |
| NO: 4425 | heterogeneous nuclear | GTTCGAGGACTCTGT |
| | ribonucleoprotein L like | GAATCTGTGGTGGAA |
| | (HNRNPLL), transcript variant 1, mRNA | GCAGACCTCGTGGAA |
| SEQ ID | GI 577019576 NM_002569 Homo sapiens | TTCTGGACGATGGCA |
| NO: 4426 | furin, paired basic | TCGAGAAGAACCACC |
| | amino acid cleaving enzyme | CGGACTTGGCAGGCA |
| | (FURIN), transcript variant 1, mRNA | ATTATGATCCTGGGG |
| SEQ ID | GI 63477961 NM_000911 Homo sapiens | GACACGGTGACCAAG |
| NO: 4427 | opioid receptor delta 1 | ATCTGCGTGTTCCTC |
| | (OPRD1), mRNA | TTCGCCTTCGTGGTG |
| | | CCCATCCTCATCATC |
| SEQ ID | GI 20514390 AF507942 Homo sapiens | TCAAGCTGGCTGACT |
| NO: 4428 | cyclin-dependent kinase 4 | TTGGCCTGGCCAGAA |
| | (CDK4) gene, complete cds | TCTACAGCTACCAGA |
| | | TGGCACTTACACCCG |
| SEQ ID | GI 342187223 NG_029593 Homo sapiens | TTAAACCTCTCAACC |
| NO: 4429 | LYN proto-oncogene, | AAGTGGCTTTCCTGG |
| | Src family tyrosine kinase | TGCTGTCCCTGAAGC |
| | (LYN), RefSeqGene on chromosome 8 | AGGTGTGAGGCCTGA |
| SEQ ID | GI 47458816 NM_005622 Homo sapiens | AACTCCAGAGAGGGG |
| NO: 4430 | acyl-CoA synthetase | TGGGGGAACCTCAAG |
| | medium chain family member 3 | GAGTTGATGAAACAT |
| | (ACSM3), transcript variant 1, mRNA | GCCAGTGACAGCCAC |
| SEQ ID | GI 149408158 NM_005259 Homo sapiens | TCTGGTACACCAAGC |
| NO: 4431 | myostatin | AAACCCCAGAGGTTC |
| | (MSTN), mRNA | AGCAGGCCCTTGCTG |
| | | TACTCCCACAAAGAT |
| SEQ ID | GI 520975386 NM_001278651 Homo sapiens | CCTTTGCTCCACTGC |
| NO: 4432 | Ran GTPase activating protein 1 | CACATATGTGAGGAC |
| | (RANGAP1), transcript variant 1, mRNA | AGCCCAGCCAACCTT |
| | | CCTTACCTCCTACCC |
| SEQ ID | GI 1049010852 AH002976 Homo sapiens | CAGTCAGAGAACTGC |
| NO: 4433 | S protein | GTTCCCCACCCCTTC |
| | (PROS1) gene, complete cds; | CCCTTTGGAAACGTC |
| | and PS-alpha gene, complete sequence | ACACTGTGGAGGAAA |
| SEQ ID | GI 168480137 NG_007294 Homo sapiens | GAACGGAGCAGGGAG |
| NO: 4434 | hydroxyacyl-CoA dehydrogenase/ | GGGCAGTGATCTGCA |
| | 3-ketoacyl-CoAthiolase/ | AGGCTGATTAATCCC |
| | enoyl-CoA hydratase | ATACAAGACAGCGCT |
| | (trifunctiona [symbol] | |
| SEQ ID | GI 588282795 NM_002168 Homo sapiens | GCCTCAGCAATGTGA |
| NO: 4435 | isocitrate dehydrogenase | AGCTGAACGAGCACT |
| | (NADP(+)) 2, mitochondrial | TCCTGAACACCACGG |
| | (IDH2), transcript variant 1, mRNA | ACTTCCTCGACACCA |
| SEQ ID | GI 50234986 AY675319 Homo sapiens | TAGAGGGCTGGTGAC |
| NO: 4436 | transforming growth | TTGTGCTTGTCTGAA |
| | factor, beta receptor II | TGCAGGAAACCAGGC |
| | (70/80 kDa) | CTGTGTAGCCTTCGG |
| | (TGFBR2) gene, complete cds | |
| SEQ ID | GI 1039673930 NG_050913 Homo sapiens | AGTGCTAAAGCCGGG |
| NO: 4437 | nuclear receptor | CAGCAAGCTCACTGC |
| | subfamily 5 group A member 2 | ATTTGCACTTCTCCA |
| | (NR5A2), RefSeqGene on chromosome 1 | TGGGAAATGCCTCTT |
| SEQ ID | GI 225579089 NG_011672 Homo sapiens | TCTGCTGTTGACAAT |
| NO: 4438 | decorin | GGCTCTCTGGCCAAC |
| | (DCN), RefSeqGene on chromosome 12 | ACGCCTCATCTGAGG |
| | | GAGCTTCACTTGGAC |
| SEQ ID | GI 195976780 NM_005201 Homo sapiens | CTGGGAAACAGCCTG |
| NO: 4439 | C-C motif chemokine receptor 8 | GTCATCCTGGTCCTT |
| | (CCR8), mRNA | GTGGTCTGCAAGAAG |
| | | CTGAGGAGCATCACA |
| SEQ ID | GI 95104789 NM_005860 Homo sapiens | CTCCATCTGCGTTGA |
| NO: 4440 | follistatin like 3 | TGCTCAGAATCGCCT |
| | (FSTL3), mRNA | ACCTGTGCCTGCGTG |
| | | TAAACCACAGCCTCA |
| SEQ ID | GI 51537346 AY728138 Homo sapiens | GTGGTTTGTCTGACA |
| NO: 4441 | chemokine | ATGTGGGGAAACCCA |
| | (C-X-C motif) receptor 4 | GTCTGCTGGCCAGCC |
| | (CXCR4) gene, complete cds | CTTGCATGAAGTAGC |
| SEQ ID | GI 1036032480 AH002739 Homo sapiens | CCGCCCTCTGAGCAC |
| NO: 4442 | cholecystokinin | GTGTTACTGCCAGTC |
| | (CCK) gene, complete cds | TGCGTCAGCGTTGGG |
| | | TAAATACATGACTGG |
| SEQ ID | GI 37499464 AY422952 Homo sapiens | TTTCCCAAGGCGGAG |
| NO: 4443 | apolipoprotein A-1 | CCTTCAAACTGGGAC |
| | (APOA1) gene, complete cds | ACATAGTCTCTGCCG |
| | | CTGTCTTTGAGCACA |
| SEQ ID | GI 334278891 NG_029019 Homo sapiens | AGAAAGGGAACGTGG |
| NO: 4444 | CCAAT/enhancer binding protein beta | GCGAGTGCTTTGGTT |
| | (CEBPB), RefSeqGene on chromosome 20 | CAGAGAGGGGAGCCA |
| | | TTTTGCCTAAGGTCA |
| SEQ ID | GI 315360651 NG_028027 Homo sapiens | CAAGTCGTGGCTTGT |
| NO: 4445 | prodynorphin | CCACTTCCTAGCTGT |
| | (PDYN), RefSeqGene on chromosome 20 | GTGCAACCACTTCCC |
| | | AGCTCTGAGCCTCAG |
| SEQ ID | GI 167614499 NM_002286 Homo sapiens | GTGACTCCCAAATCC |
| NO: 4446 | lymphocyte activating 3 | TTTGGGTCACCTGGA |
| | (LAG3), mRNA | TCCCTGGGGAAGCTG |
| | | CTTTGTGAGGTGACT |
| SEQ ID | GI 413968625 JX877554 Homo sapiens | GGCGGGACTTGGACT |
| NO: 4447 | krueppel-like factor 1 | TGGCTGGCCTCTGAG |
| | (KLF1) gene, complete cds | AGTGAGTGCCTCCTT |
| | | AAATTTTGTGCCCTA |
| SEQ ID | GI 342349316 NG_029618 Homo sapiens | GCCTCCTGATTGGTC |
| NO: 4448 | CD28 molecule | TCTGCCTCAGTTCTT |
| | (CD28), RefSeqGene on chromosome 2 | CCCTTGCTCCAAGCC |
| | | AAGGGCAGTCAAGAT |
| SEQ ID | GI 31321969 AY114157 Homo sapiens | ATCAGGCCTGACTCG |
| NO: 4449 | inhibitor of kappaB kinase gamma | CTGCTCTTTTTGTTC |
| | (IKBKG) mRNA, complete cds | CCTTCTGTCTGCTCG |
| | | AACCACTTGCCTCGG |
| SEQ ID | GI 24286757 AY163769 Homo sapiens | GTATGCAGCTGTCAG |
| NO: 4450 | excision repair cross-complementing | CGTTGGGCTGCAAAC |
| | rodent repair deficiency, | CAGTGACATCACCGA |
| | complementation group 3 | GTACCTCAGGAAGCT |
| | (xeroc [symbol] | |
| SEQ ID | GI 336088682 NG_029094 Homo sapiens | CAGGAGCTCGGAGTG |
| NO: 4451 | apoptotic peptidase activating factor 1 | GTGGTAACAGATGCC |
| | (APAF1), RefSeqGene on chromosome 12 | CTAAGAGCAGATGCC |
| | | CTAAGGAGCACTGGA |
| SEQ ID | GI 334278891 NG_029019 Homo sapiens | AGGTTTGGGAGTCTG |
| NO: 4452 | CCAAT/enhancer binding protein beta | GTGGGAACAATGCCA |
| | (CEBPB), RefSeqGene on chromosome 20 | CCACCACTGACAGTA |
| | | GCGACACCCTTCATG |
| SEQ ID | GI 340805876 NG_029513 Homo sapiens | TGTCGGGAGTAGCAC |
| NO: 4453 | ribosomal protein 56 kinase B1 | TGCCGCTGCTGTTAC |
| | (RPS6KB1), RefSeqGene on chromosome 17 | AGCCACCAGGAGTTT |
| | | TATTTCGGGAGCAAG |
| SEQ ID | GI 291463310 NM_002169 Homo sapiens | GGTCACTCAATCTCA |
| NO: 4454 | interferon alpha 5 | ACAGCCCAGAAGCAT |
| | (IFNA5), mRNA | CTGCAACCTCCCCAA |
| | | TGGCCTTGCCCTTTG |
| SEQ ID | GI 341865606 NG_029554 Homo sapiens | TGATGAAGGTGTTGC |
| NO: 4455 | Fc fragment of IgE receptor II | TGACCTTGGAGGGGT |
| | (FCER2), RefSeqGene on chromosome 19 | TTGTTGGTGGTTGAA |
| | | GTGCTGCTGGCCATG |
| SEQ ID | GI 1174251657 KY500414 Homo sapiens | GGCGAGAGGGTGTAC |
| NO: 4456 | LTB gene, complete cds | GTCAACATCAGTCAC |
| | | CCCGATATGGTGGAC |
| | | TTCGCGAGAGGGAAG |
| SEQ ID | GI 1206876284 NG_033870 Homo sapiens | TGAGACGTCCCTCCT |
| NO: 4457 | asparagine synthetase | GCCCCTGGCTGCCTT |
| | (glutamine-hydrolyzing) | ATTTCATCTGCACCC |
| | (ASNS), RefSeqGene on chromosome 7 | AATCGTATCCATTGC |
| SEQ ID | GI 189339243 NG_007969 Homo sapiens | AACCCTGCAGGGCCA |
| NO: 4458 | cytochrome P450 family | TGCCTTGAATTCCCT |
| | 7 subfamily A member 1 | CACGGAAAGCATGAT |
| | (CYP7A1), RefSeqGene on chromosome 8 | GGAAAACCTCCAACG |
| SEQ ID | GI 8308037 AF244139 Homo sapiens | CCTGTGGGGGGCAGA |
| NO: 4459 | integrin-linked kinase 1 | GGGTTTTCACAGAGG |
| | (ILK) gene, complete cds | ACGCAGTTTGAGCTG |
| | | AATCTTGACTGCAGA |
| SEQ ID | GI 1128611453 NM_019058 Homo sapiens | CCCGACTTCGAGCTG |
| NO: 4460 | DNA damage inducible transcript 4 | CTCAGTGACCCTGAG |
| | (DDIT4), mRNA | GATGAACACTTGTGT |
| | | GCCAACCTGATGCAG |
| SEQ ID | GI 769468216 NM_003246 Homo sapiens | AATCCCTGCTTTGCC |
| NO: 4461 | thrombospondin 1 | GGCGTGAAGTGTACT |
| | (THBS1), mRNA | AGCTACCCTGATGGC |
| | | AGCTGGAAATGTGGT |
| SEQ ID | GI 440502998 JX512445 Homo sapiens | AGGTCTTTGCACGGT |
| NO: 4462 | integrin, alpha V | TTGGCAGTGCCATAG |
| | (ITGAV) gene, complete cds | CTCCTTTGGGAGATC |
| | | TGGACCAGGATGGTT |
| SEQ ID | GI 1036030212 AH006319 Homo sapiens | AGTTGGTCTCTTCCC |
| NO: 4463 | succinate dehydrogenase subunit C | ATGGCGATGTCCATC |
| | (SDHC) gene, complete cds | TGCCACCGTGGCACT |
| | | GGTATTGCTTTGAGT |
| SEQ ID | GI 806904734 NG_008957 Homo sapiens | AACTGCAACCACAGT |
| NO: 4464 | monoamine oxidase A | TATCCCCACCCAAGC |
| | (MAOA), RefSeqGene on chromosome X | CGTTGTGGTCTTTTG |
| | | CCTTTGTCCAAGCCA |
| SEQ ID | GI 292658763 NM_014143 Homo sapiens | ACACAGCCCTCCTAA |
| NO: 4465 | CD274 molecule | GAGGCTTCCTGGAGG |
| | (CD274), transcript variant 1, mRNA | TTTCGAGATTCAGAT |
| | | GCCCTGGGAGATCCC |
| SEQ ID | GI 70995318 NM_002506 Homo sapiens | GAGCAAGCGGTCATC |
| NO: 4466 | nerve growth factor | ATCCCATCCCATCTT |
| | (NGF), mRNA | CCACAGGGGCGAATT |
| | | CTCGGTGTGTGACAG |
| SEQ ID | GI 166706778 EU332848 Homo sapiens | GCTTTGGCAAGCAGG |
| NO: 4467 | integrin, beta 5 | GGTGCTACTGAGTGT |
| | (ITGB5) gene, complete cds | GTGAGTATTTCCCTC |
| | | TGGACGTGTGTCCCC |
| SEQ ID | GI 343790959 NG_029764 Homo sapiens | GGCAGCTTTAGGTAT |
| NO: 4468 | AKT serine/threonine kinase 3 | GCTGTGGTTGGAAGG |
| | (AKT3), RefSeqGene on chromosome 1 | CTGTTGGCATGGGAA |
| | | AGCTGGAAGTGTGGG |
| SEQ ID | GI 1049480218 NG_051308 Homo sapiens | CTGGTGATAAGAATG |
| NO: 4469 | ras homolog family member A | GGGTAGCAGAGCTGG |
| | (RHOA), RefSeqGene on chromosome 3 | GTGCAGTGCTGGGCA |
| | | GTGTTGAATGGGACT |
| SEQ ID | GI 385275063 NG_032144 Homo sapiens | ATACAGGAGGCAGAG |
| NO: 4470 | transient receptor potential cation | ACACAGCTGGACTAG |
| | channel subfamily V member 3 | AACCCAGGCTTTAGG |
| | (TRPV3), RefSeqGene on [symbol] | TTCCCAGGCAAGGGT |
| SEQ ID | GI 527317415 NM_000304 Homo sapiens | AACTGGAGCCCTTGC |
| NO: 4471 | peripheral myelin protein 22 | AAAAACACGGCTTGT |
| | (PMP22), transcript variant 1, mRNA | GGCATTGGCATACTT |
| | | GCCCTTACAGGTGGA |
| SEQ ID | GI 41353192 AY486465 Homo sapiens | AGAAATGCAGAACAC |
| NO: 4472 | glutathione transferase kappa 1 | GGCCACCTCTTAGCC |
| | (GSTK1) gene, complete cds | CAACGATGGCAGTTT |
| | | TGGGGAAAACTGGCC |
| SEQ ID | GI 340805836 NG_029500 Homo sapiens | CTCATCATGGAGCCC |
| NO: 4473 | fatty acid binding protein 6 | ATGTGGTGTGGGCAG |
| | (FABP6), RefSeqGene on chromosome 5 | TGACCAGAGTTCAGG |
| | | GTCATCATGCACACA |
| SEQ ID | GI 334358873 NG_029029 Homo sapiens | CTGGTTTGCAGGCCT |
| NO: 4474 | sterol regulatory element | CTTCAATAAAGGTGG |
| | binding transcription factor 1 | GGCTGTGCTAGGCAT |
| | (SREBF1), RefSeqGene on chromoso [symbol] | TGGGGATGCAGCAAT |
| SEQ ID | GI 584277093 NM_001675 Homo sapiens | GGAAGAATCCCCTGG |
| NO: 4475 | activating transcription factor 4 | TCTCCGTGAGCGTCC |
| | (ATF4), transcript variant 1, mRNA | ATTTTGTGGAACCTG |
| | | AGTTGCAAGCAGGGA |
| SEQ ID | GI 374252456 NM_001252406 Homo sapiens | CAGGGCTGTGCTAGC |
| NO: 4476 | zinc finger and BTB domain containing 7B | TGCCTGTAGCCACTA |
| | (ZBTB7B), transcript variant 3, mRNA | CTTCAAGAAGCTTTT |
| | | CACTGAGGGCGGTGG |
| SEQ ID | GI 269914110 NG_015981 Homo sapiens | TTCCCTCCAATTCCC |
| NO: 4477 | anti-Mullerian hormone receptor type 2 | ACTTGCCCTCCACCT |
| | (AMHR2), RefSeqGene on chromosome 12 | GCTACTCTGTTATCT |
| | | ACTGGCTCTGCCCGT |
| SEQ ID | GI 662236863 NG_034192 Homo sapiens | TCCCTGTGCACAAGT |
| NO: 4478 | diacylglycerol O-acyltransferase 1 | GGTGCATCAGGTAGG |
| | (DGAT1), RefSeqGene on chromosome 8 | TGGGGTGTGTGTGTG |
| | | TGTGATGTGGAACAT |
| SEQ ID | GI 15545992 AY029254 Homo sapiens | CACCGGCTTCATGTG |
| NO: 4479 | Be 1-2 modifying factor | CAGCAACACCAGCAG |
| | (BMF) mRNA, complete cds | AACCAAAATCGTGTG |
| | | TGGTGGCAGATCCTC |
| SEQ ID | GI 187171274 NM_030662 Homo sapiens | GAAGAAGCGGCTGGA |
| NO: 4480 | mitogen-activated | AGCCTTTCTCACCCA |
| | protein kinase kinase 2 | GAAAGCCAAGGTCGG |
| | (MAP2K2), mRNA | CGAACTCAAAGACGA |
| SEQ ID | GI 89142743 NM_023068 Homo sapiens | TGCAAGATGTGCCTG |
| NO: 4481 | sialic acid binding ig like lectin 1 | CAGGTGATGACACCT |
| | (SIGLEC1), mRNA | ATGTTTGCACAGCCC |
| | | AAAACTTGCTGGGCT |
| SEQ ID | GI 1168024008 KY497359 Homo sapiens | TCCTCACGCCTCCCC |
| NO: 4482 | HLA-E | TATGTGTCTTAGGGG |
| | (HLA-E) gene, complete cds | ACTCTGGCTTCTCTT |
| | | TTTGCAAGGGCCTCT |
| SEQ ID | GI 224967082 NG_011581 Homo sapiens | GTGCCTGGACAATGC |
| NO: 4483 | thyroid peroxidase | TCTGATCCACCCAGG |
| | (TPO), RefSeqGene on chromosome 2 | TGTTGGCAGCATTGT |
| | | TGCAAAGGTCACCTC |
| SEQ ID | GI 1025608649 NG_047040 Homo sapiens | GCAGTGTCCCCCATC |
| NO: 4484 | calcium/calmodulin dependent | CCGACCCCACAGGAA |
| | protein kinase 11 alpha | GACAAATTAGAAAAA |
| | (CAMK2A), RefSeqGene on chromos [symbol] | GCCCCCTCTGGATCC |
| SEQ ID | GI 313747578 NM_015162 Homo sapiens | GCCAAGGTTCGCCAG |
| NO: 4485 | acyl-CoA synthetase | GCACTGGGATTTGCC |
| | bubblegum family member 1 | AAGTGTCAAAAGAAC |
| | (ACSBG1), transcript variant 1, mRNA | TTCTATGGAGCGGCC |
| SEQ ID | GI 297374833 NM_006184 Homo sapiens | AATGAGGGCATGGGG |
| NO: 4486 | nucleobindin 1 | TGGTCCCTCAAGACC |
| | (NUCB1), mRNA | TTCCCCTACCTTTTG |
| | | TGGAACCAGTGATGC |
| SEQ ID | GI 21105786 AF512504 Homo sapiens | TTCCACGGGAAAGTG |
| NO: 4487 | X-ray repair complementing | TTGTAGGGGAAACTC |
| | defective repair in Chinese | CAGGCAGAGTGTCGG |
| | hamster cells 1 | GGGATTAACGGGAGA |
| | (XRCC1) gene, complete [symbol] | |
| SEQ ID | GI 398303864 NG_032876 Homo sapiens | TCCTCACAAGGACTC |
| NO: 4488 | major histocompatibility | ATGGCTTGCCCCATA |
| | complex, class II, DQ alpha 1 | GCATCACATCTGTGC |
| | (HLA-DQA1), RefSeqGene on chromos [symbol] | TGCTTACCAGCTGCG |
| SEQ ID | GI 22027540 NM_005707 Homo sapiens | TGGCATTCCCCTACC |
| NO: 4489 | programmed cell death 7 | CTGAAGTTATGCTTT |
| | (PDCD7), mRNA | CCTTCTGTGCTCTGT |
| | | GCTGGCCAGAGGTGC |
| SEQ ID | GI 994323650 NG_011530 Homo sapiens | AGCTGGGATGCAAAC |
| NO: 4490 | 2′-5′-oligoadenylate synthetase 1 | CCTAAACTGCCAGCC |
| | (OAS1), RefSeqGene on chromosome 12 | CTCAAAGCCTGTGCT |
| | | CTTAATCTCCACCCT |
| SEQ ID | GI 1049480218 NG_051308 Homo sapiens | ATGGGTGGACTGGTG |
| NO: 4491 | ras homolog family member A | GGGATTCTGGCGTAA |
| | (RHOA), RefSeqGene on chromosome 3 | AATGGTATGGTGGCA |
| | | TGAGTCAGGGCACAA |
| SEQ ID | GI 425905339 NM_080725 Homo sapiens | GAGTCCCTGGGGAAA |
| NO: 4492 | sulfiredoxin 1 | GGGAACAGAGTAAGG |
| | (SRXN1), mRNA | CAGGCCTTGTTCTCA |
| | | CTGCCCTCTAAGGGA |
| SEQ ID | GI 225543278 NG_011648 Homo sapiens | GACCAGGGAACTAGG |
| NO: 4493 | angiotensin 1 converting enzyme | TGGTACATGCTTGCA |
| | (ACE), RefSeqGene on chromosome 17 | CCCAGCATTCAAAGT |
| | | GAGAGGCCTGTGCCA |
| SEQ ID | GI 1024846763 NG_046978 Homo sapiens | CTCCACCCACAGACA |
| NO: 4494 | Charcot-Leyden crystal galectin | CAAGGTTAGGACACC |
| | (CLC), RefSeqGene on chromosome 19 | TCCATTTCCACTGCC |
| | | TCCCCTCACCCAGTA |
| SEQ ID | GI 260593656 NG_013016 Homo sapiens | GGTCCTAGACTCAAC |
| NO: 4495 | phosphoglycerate mutase 2 | TCCGTGCCACCCTTC |
| | (PGAM2), RefSeqGene on chromosome 7 | AGCCTACGTTGTGGG |
| | | TTCCTGCTAAGCTGA |
| SEQ ID | GI 571330780 NM_001136022 Homo sapiens | CACTTGCCATTGCCT |
| NO: 4496 | nuclear factor of activated T-cells 4 | CAGCTTTCCCCTAAA |
| | (NFATC4), transcript variant 1, mRNA | CACGGTGTCTGTGGT |
| | | CAGGGTTGGTGAGGA |
| SEQ ID | GI 77744394 DQ230990 Homo sapiens | AGCTGCCAAGTAGGT |
| NO: 4497 | peroxiredoxin 6 | GGCCGAAAGACTTTT |
| | (PRDX6) gene, complete cds | TGTCCAGAGCCGCCT |
| | | CCAATGGCCAAGATA |
| SEQ ID | GI 1147489694 NG_016780 Homo sapiens | ACACCTGTTCCTCAG |
| NO: 4498 | acyl-CoA thioesterase 9 | GCCTCCTCCCTCAAT |
| | (ACOT9), RefSeqGene on chromosome X | ACCGTCTCTTTGACT |
| | | TGCTCTCCTGGCACC |
| SEQ ID | GI 182995 M68891 Human | CCAGACGAGGTGGAC |
| NO: 4499 | GATA-binding protein | GTCTTCTTCAATCAC |
| | (GATA2) mRNA, complete cds | CTCGACTCGCAGGGC |
| | | AACCCCTACTATGCC |
| SEQ ID | GI 340805891 NG_029487 Homo sapiens | AGCCTCCTTGGATAA |
| NO: 4500 | BCL2 related protein A1 | GCTAAGCACATTCCA |
| | (BCL2A1), RefSeqGene on chromosome 15 | CCCTCAAGGCCTTTG |
| | | CACTTGCTGCTCCCT |
| SEQ ID | GI 1036030581 AH008227 Homo sapiens | AGCAGCAGGAACTTG |
| NO: 4501 | chromosome 1 PEA15 protein | GGCCTCTTCTAGGAA |
| | (PEA15) gene, complete cds | TGGTGTAGACCCAAG |
| | | AAAGGAGGGGCTCGT |
| SEQ ID | GI 1028908930 NG_050628 Homo sapiens | TGCAGCAGTTCTAGC |
| NO: 4502 | nuclear factor kappa B subunit 1 | CAAGTGCATGCATAC |
| | (NFKB1), RefSeqGene on chromosome 4 | AGGCCTTGAGGTGGA |
| | | GCTGCACAGTTGACT |
| SEQ ID | GI 15545992 AY029254 Homo sapiens | GGAGCCATCTCAGTG |
| NO: 4503 | Be 1-2 modifying factor | TGTGGAGGAGCTGGA |
| | (BMF) mRNA, complete cds | GGATGATGTGTTCCA |
| | | ACCAGAGGATGGGGA |
| SEQ ID | GI 61744461 NM_003405 Homo sapiens | TGCACCTGAGCAAGC |
| NO: 4504 | tyrosine 3-monooxygenase/ | CTGCCTCTTAGCCAA |
| | tryptophan 5-monooxygenase | ACAAGCCTTCGATGA |
| | activation protein eta | TGCCATAGCTGAGCT |
| | (YWHAH), [symbol] | |
| SEQ ID | GI 182739 L10820 Human | AGAGGCATCATCCGG |
| NO: 4505 | N-formyl peptide receptor | TTCATCATTGGCTTC |
| | (FPR1) gene, complete cds | AGCGCACCCATGTCC |
| | and Alu repeats | ATCGTTGCTGTCAGT |
| SEQ ID | GI 205277450 NM_001135054 Homo sapiens | GTGCCCGCACAGACT |
| NO: 4506 | single Ig and TIR domain containing | TCTACTGCCTGGTGT |
| | (SIGIRR), transcript variant 1, mRNA | CCAAGGATGATATGT |
| | | AGCTCCCACCCCAGA |
| SEQ ID | GI 874507491 NG_042218 Homo sapiens | GGATTGCCTTCCTGC |
| NO: 4507 | surfactant protein D | CTTCCCAGGATGTGG |
| | (SFTPD), RefSeqGene on chromosome 10 | AGCTGGTATACTCCT |
| | | TCCCACTCTGGTGGA |
| SEQ ID | GI 254039585 NG_012387 Homo sapiens | TCACACCTCACTTCT |
| NO: 4508 | aldolase, fructose-bisphosphate B | GCTTTGTCCTAGGCA |
| | (ALDOB), RefSeqGene on chromosome 9 | AACTCCAAGCACACT |
| | | GGCAAGGACAGGGCC |
| SEQ ID | GI 1024336774 NG_046918 Homo sapiens | AGTTGGAGGGAGTGT |
| NO: 4509 | DExD/H-box helicase 58 | TGTCACAAGCCAAGG |
| | (DDX58), RefSeqGene on chromosome 9 | AATGCCAGCAGCTAC |
| | | CAGAAACCGGAAGGG |
| SEQ ID | GI 430727969 NG_033033 Homo sapiens | TTCAGATGCTGACAA |
| NO: 4510 | ISG15 ubiquitin-like modifier | TTTTGGTGACCCCTG |
| | (ISG15), RefSeqGene on chromosome 1 | AGATTTGCTGGGAGA |
| | | CGGGGAAGGGCCAGG |
| SEQ ID | GI 325651826 NM_001443 Homo sapiens | TCACCGCTGGGTCCA |
| NO: 4511 | fatty acid binding protein 1 | AAGTGATCCAAAACG |
| | (FABP1), mRNA | AATTCACGGTGGGGG |
| | | AGGAATGTGAGCTGG |
| SEQ ID | GI 2789671 AF040714 Homo sapiens | AGCAGCCGCCAGCGC |
| NO: 4512 | homeobox protein A10 | CAATAAATAAGCCCA |
| | (HOXA10) gene, complete cds | TTAACCGGCGAAGTT |
| | | CGAGTGTACGATCCC |
| SEQ ID | GI 297307113 NG_021395 Homo sapiens | GCAAGGGAAGAAAAA |
| NO: 4513 | erythropoietin receptor | GGGCAGCAATGACCC |
| | (EPOR), RefSeqGene on chromosome 19 | TCAATGGGCCATTTG |
| | | AGGGATCTGGCCTGG |
| SEQ ID | GI 237858689 NG_012090 Homo sapiens | CTGCCACAGGAGGTT |
| NO: 4514 | interleukin 13 | CCCCAAGTGAAAACA |
| | (IL13), RefSeqGene on chromosome 5 | GTCAGCCACCTGCCC |
| | | TATAGGAAACAGCCC |
| SEQ ID | GI 209364548 NM_001912 Homo sapiens | CAGCTGGGGTGAAGA |
| NO: 4515 | cathepsin L | ATGGGGCATGGGTGG |
| | (CTSL), transcript variant 1, mRNA | CTACGTAAAGATGGC |
| | | CAAAGACCGGAGAAA |
| SEQ ID | GI 37577125 NM_194315 Homo sapiens | GGCCTTGGGTACCTG |
| NO: 4516 | ubiquitin conjugating enzyme E2 J2 | CAGAGCCTTTTCTCT |
| | (UBE2J2), transcript variant 1, mRNA | GAATTCCTTATGTCC |
| | | GGTGGGCCAGAAGCC |
| SEQ ID | GI 45505189 AY572796 Homo sapiens | TCAGTCCTGCCGAGG |
| NO: 4517 | signal transducer and | CAGATGGCTTCCTCC |
| | activator of transcription 3 | AGCTCTGCTTACTGA |
| | (acute-phase response factor) | ATGCGAAGTCACAGT |
| | (STAT3) gene, c [symbol] | |
| SEQ ID | GI 343098515 NG_029659 Homo sapiens | CCCCATTGCACGCAG |
| NO: 4518 | bone morphogenetic protein 1 | GACATAGCAGAGGCT |
| | (BMP1), RefSeqGene on chromosome 8 | CAGAGGTTGCGTGGT |
| | | TTGCTTGATGACTCA |
| SEQ ID | GI 698320876 NM_015995 Homo sapiens | AGAGCCCTGGGTGCT |
| NO: 4519 | Kruppel like factor 13 | TGTGGTGCAAAGATC |
| | (KLF13), transcript variant 1, mRNA | TTCATGCCCAGTTCC |
| | | AAAGTGAGGTCCCTC |
| SEQ ID | GI 117606583 EF064766 Homo sapiens | TGCTGAAGACTGCTG |
| NO: 4520 | chemokine | CCTGTCTGTGACCCA |
| | (C-C motif) ligand 19 | GAAACCCATCCCTGG |
| | (CCL19) gene, complete cds | GTACATCGTGAGGAA |
| SEQ ID | GI 170763484 NG_007481 Homo sapiens | ACTGAGGCAGGAGAT |
| NO: 4521 | complement C3b/C4b receptor 1 | GGGCAGGGCTTGTGT |
| | (Knops blood group) | TCTGGTCACAATCCT |
| | (CR1), RefSeqGene on | GCTGACCAAAACAGG |
| | chromosome 1 [symbol] | |
| SEQ ID | GI 695917236 NM_021010 Homo sapiens | AGGCCCAGGCTGAGT |
| NO: 4522 | defensin alpha 5 | CACTCCAGGAAAGAG |
| | (DEFA5), mRNA | CTGATGAGGCTACAA |
| | | CCCAGAAGCAGTCTG |
| SEQ ID | GI 1060856491 NM_005526 Homo sapiens | TCAAACCGGATCCTG |
| NO: 4523 | heat shock transcription factor 1 | GGGGTGAAGAGAAAG |
| | (HSF1), mRNA | ATCCCCCTGATGCTG |
| | | AACGACAGTGGCTCA |
| SEQ ID | GI 263191400 NG_015828 Homo sapiens | TCTTCCCAGGTCTTG |
| NO: 4524 | glutamic-pyruvic transaminase | GCCCTCTGTGTTAAC |
| | (GPT), RefSeqGene on chromosome 8 | CCTGATCTTCTGAGC |
| | | AGCCCCAACTTCCCT |
| SEQ ID | GI 576795860 NM_001549 Homo sapiens | AGCCTGGTCACCAGC |
| NO: 4525 | interferon induced protein | TTTTCGGAACAGCAG |
| | with tetratricopeptide repeats 3 | AGACACAGAGGGCAG |
| | (1 FITS), transcript | TCATGAGTGAGGTCA |
| | variant 1, mR [symbol] | |
| SEQ ID | GI 343098515 NG_029659 Homo sapiens | AGTGTGTACCGTGTG |
| NO: 4526 | bone morphogenetic protein 1 | CACATGTATGTGTGT |
| | (BMP1), RefSeqGene on chromosome 8 | GCCTGTGGACCAGCA |
| | | CCTGTGTTGCCACAT |
| SEQ ID | GI 187171274 NM_030662 Homo sapiens | CCTGGACCAGGTGCT |
| NO: 4527 | mitogen-activated | GAAAGAGGCCAAGAG |
| | protein kinase kinase 2 | GATTCCCGAGGAGAT |
| | (MAP2K2), mRNA | CCTGGGGAAAGTCAG |
| SEQ ID | GI 19909347 AF495471 Homo sapiens | GTGTGCTGGGGAAGC |
| NO: 4528 | thrombomodulin | TCCATGCACAGTGCC |
| | (THBD) gene, complete cds | CTATGGAGATAACAA |
| | | GCTGAGCCATGCTCC |
| SEQ ID | GI 296923725 NG_012838 Homo sapiens | AGGCTTCATGGGGGT |
| NO: 4529 | glucose-6-phosphate isomerase | TGGAGGGTCTGCTTT |
| | (GPI), RefSeqGene on chromosome 19 | GAAGATGGCTCACTA |
| | | GCAGTGCTGCCTTTG |
| SEQ ID | GI 390979633 NM_004135 Homo sapiens | CCTGCCACCGTCGCA |
| NO: 4530 | isocitrate dehydrogenase 3 | CAAATCTCGAAACAA |
| | (NAD(+)) gamma | CATCCTTCGCACCAG |
| | (IDH3G), transcript variant 1, mRNA | CCTGGACCTCTATGC |
| SEQ ID | GI 300863108 NG_023389 Homo sapiens | GAGCGTCCATGACCA |
| NO: 4531 | acetyl-CoA acetyltransferase 2 | CTGTGCACACACAGC |
| | (ACAT2), RefSeqGene on chromosome 6 | AGGTTTCATGAGAAG |
| | | CTGGAGCACTGGCTC |
| SEQ ID | GI 350276269 NG_030323 Homo sapiens | TGATCACCATCTTAC |
| NO: 4532 | sialic acid binding Ig like lectin 11 | TGAGCACATTGCCAC |
| | (SIGLEC11), RefSeqGene on chromosome 19 | TGCAGCCAGCAACTG |
| | | AGAAGCCAGCGCACA |
| SEQ ID | GI 8133099 AF266756 Homo sapiens | GGAGTCACGTGCAGC |
| NO: 4533 | sphingosine kinase | CCCTTTTGGCTGAGG |
| | (SPHK1) mRNA, complete cds | CTGAAATCTCCTTCA |
| | | CGCTGATGCTCACTG |
| SEQ ID | GI 356460958 NG_030484 Homo sapiens | CAGTGCGTCTGCATG |
| NO: 4534 | adenosine kinase | AATTCCTGGCAGCTC |
| | (ADK), RefSeqGene on chromosome 10 | TCCAAAATGGGCTCA |
| | | GGGCTTGTGAGGACT |
| SEQ ID | GI 197276631 NM_003670 Homo sapiens | AACCAAGCCTTGGCA |
| NO: 4535 | basic helix-loop-helix family member e40 | CCGCCAGATCCTTTC |
| | (BHLHE40), mRNA | TGTAGGCTAATTCCT |
| | | CTTGCCCAACGGCAT |
| SEQ ID | GI 83367074 NM_175617 Homo sapiens | AGAGCAGCCAGTTGC |
| NO: 4536 | metallothionein 1E | AGGGCTCCATTCTGC |
| | (MT1E), mRNA | TTTCCAACTGCCTGA |
| | | CTGCTTGTTCGTCTC |
| SEQ ID | GI 686223163 NG_034261 Homo sapiens | TGAGCCACTTGCTTG |
| NO: 4537 | primase | GGCCGCTGCCATTCT |
| | (DNA) subunit 2 | GTGGAGTGTGCTTTC |
| | (PRIM2), RefSeqGene on chromosome 6 | ACTACTATTGCCTCC |
| SEQ ID | GI 423091980 JX512648 Homo sapiens | CTGAGGGACAGCGAG |
| NO: 4538 | SH2 domain containing 1A | AGCGTGCCAGGCGTG |
| | (SH2D1A) mRNA, complete cds | TACTGCCTATGTGTG |
| | | CTGTATCACGGTTAC |
| SEQ ID | GI 237874189 NG_012169 Homo sapiens | ATTGCATCTGTTTCC |
| NO: 4539 | angiopoietin like 4 | TGCCCCCACCTCTTC |
| | (ANGPTL4), RefSeqGene on chromosome 19 | CTTACATGCCGTGTG |
| | | TGTGATTGGGCCACT |
| SEQ ID | GI 238018073 NG_012199 Homo sapiens | ACATGTTGGGGGAGT |
| NO: 4540 | ketohexokinase | CGTGTTGTAATGGGG |
| | (KHK), RefSeqGene on chromosome 2 | GCAACGCTAGGCTGC |
| | | TGTTGGTGAATGACG |
| SEQ ID | GI 197304767 NM_014674 Homo sapiens | GGGCAGCTGATGAAC |
| NO: 4541 | ER degradation enhancing | ACCTGGATTGACTCT |
| | alpha-mannosidase like protein 1 | CTGCAGGCCTTTTTC |
| | (EDEM1), mRNA | CCTGGACTGCAGGTG |
| SEQ ID | GI 1024336777 NG_046929 Homo sapiens | ACCCTCACTTCCATC |
| NO: 4542 | BTG anti-proliferation factor 2 | ACCCCATTCCCCCTC |
| | (BTG2), RefSeqGene on chromosome 1 | TTCAGTGGGTGAAGT |
| | | CACTGGTCAGCACAA |
| SEQ ID | GI 263191773 NG_015830 Homo sapiens | ACCCTGCGCACTGGA |
| NO: 4543 | insulin receptor substrate 1 | AGATCTGGCCAGCAA |
| | (IRS1), RefSeqGene on chromosome 2 | CCTTGTTATTTTCAC |
| | | CAGCCCTCTCCCATG |
| SEQ ID | GI 325910849 NG_028199 Homo sapiens | AATGGTGGGGCTTTG |
| NO: 4544 | scavenger receptor class B member 1 | GGGAGCAGATGGAGG |
| | (SCARB1), RefSeqGene on chromosome 12 | AACTGGGGGTAAAAC |
| | | AGCGTGTTCCAGTTT |
| SEQ ID | GI 42716353 AY549314 Homo sapiens | GGGCACTAATCCAGC |
| NO: 4545 | tyrosine kinase 2 | CCTTAAATCCCCCAG |
| | (TYK2) gene, complete cds | CTTCCAAACTTGAGG |
| | | CCCACCATCTCCACC |
| SEQ ID | GI 117422442 NM_001242 Homo sapiens | GGCCCTTTCCTGTGT |
| NO: 4546 | CD27 molecule | ACACGTGACAGAGTG |
| | (CD27), mRNA | CCTTTTCGAGACTGG |
| | | CAGGGACGAGGACAA |
| SEQ ID | GI 260166681 NM_138387 Homo sapiens | CTGGCCCTCATGCTA |
| NO: 4547 | glucose-6-phosphatase | GGCACCAGCCTCATC |
| | catalytic subunit 3 | TATTGGACCCTCTTT |
| | (G6PC3), transcript | ACACTGGGCCTGGAT |
| | variant 1, mRNA | |
| SEQ ID | GI 156616272 NM_002664 Homo sapiens | TCGCTGCTCAATGAG |
| NO: 4548 | pleckstrin | GGGTATCTGCAGCCT |
| | (PLEK), mRNA | GCTGGAGACATGTCC |
| | | AAGAGTGCAGTGGAT |
| SEQ ID | GI 7407497 AF243044 Homo sapiens | ACGCAAAAGCTACCC |
| NO: 4549 | ECSIT | CATGCTCAAGTTGGT |
| | (ECSIT) mRNA, complete cds | GCGCCTGAAGCTGTG |
| | | GTTCCCTCGATTCAT |
| SEQ ID | GI 260763977 NG_013058 Homo sapiens | TCCCAGCCTCTGTTG |
| NO: 4550 | 5-hydroxytryptamine receptor 3A | AAAGGAACTCATGAG |
| | (HTR3A), RefSeqGene on chromosome 11 | CCAGCCCCTTCACTC |
| | | TCAGCCAGCTCTGTT |
| SEQ ID | GI 197116369 NG_008383 Homo sapiens | ACCCAGTGCTGGAGC |
| NO: 4551 | cytochrome P450 family 2 | CCCAGCTTCTAACAG |
| | subfamily E member 1 | GGCACTATTTCCCTC |
| | (CYP2E1), RefSeqGene on | CTGTAGGCATCACTG |
| | chromosome 10 [symbol] | |
| SEQ ID | GI 336455046 NG_029166 Homo sapiens | AGTTGGTGCTCCTGG |
| NO: 4552 | SRY-box 4 | AGCTGCTTTCTCCTT |
| | (SOX4), RefSeqGene on chromosome 6 | GATTTGCCCATGCTT |
| | | ACCTCCAGCAGTGGC |
| SEQ ID | GI 189409110 NM_153000 Homo sapiens | ACAACCTCGACCACC |
| NO: 4553 | APC down-regulated 1 | TGGTCGAGGAGCTCT |
| | (APCDD1), mRNA | TCCTTGGTGACATTC |
| | | ACACTGATGCCACCC |
| SEQ ID | GI 425905339 NM_080725 Homo sapiens | CCCTTGGCCCGAGCC |
| NO: 4554 | sulfiredoxin 1 | AGCTACCATTGCACC |
| | (SRXN1), mRNA | TCTAGCTGCAAACAA |
| | | AGCTAAGACAGCAGG |
| SEQ ID | GI 40288420 AY505111 Homo sapiens | GGAGGCAGCGGCTTT |
| NO: 4555 | arachidonate 15-lipoxygenase | TATGCTCAAAAGGAA |
| | (ALOX15) gene, complete cds | TGAGTCCCAGTGGCT |
| | | GGCACAGAGAAGGCA |
| SEQ ID | GI 270048011 GU143397 Homo sapiens | GCGAAGATGGCAAGG |
| NO: 4556 | collagen, type III, alpha 1 | ATGGATCACCTGGAG |
| | (COL3A1) gene, complete cds | AACCTGGTGCAAATG |
| | | GGCTTCCAGGAGCTG |
| SEQ ID | GI 14423572 AF388025 Homo sapiens | TGCAGGGCCAACATC |
| NO: 4557 | colony stimulating factor 3 | CTCTGGAAGGGACAT |
| | (granulocyte) | GGGAGAATATTAGGA |
| | (CSF3) gene, complete cds | GCAGTGGAGCTGGGG |
| SEQ ID | GI 41872630 NM_004104 Homo sapiens | ACGGTCGCTTCCTGG |
| NO: 4558 | fatty acid synthase | AAATTGGCAAATTCG |
| | (FASN), mRNA | ACCTTTCTCAGAACC |
| | | ACCCGCTCGGCATGG |
| SEQ ID | GI 338827642 NG_029226 Homo sapiens | ACCACAATGCCCAGC |
| NO: 4559 | nuclear factor of activated T-cells 1 | ATGTGGGGAAGAGAG |
| | (NFATC1), RefSeqGene on chromosome 18 | AGGAAAGGTGGGGTT |
| | | TATCCTCACCCGAGT |
| SEQ ID | GI 145312264 NM_033266 Homo sapiens | ACGTGCTTTCTGGTG |
| NO: 4560 | endoplasmic reticulum | GCAGCCACCCCTTTG |
| | to nucleus signaling 2 | GAGACAGTCTTTATC |
| | (ERN2), transcript variant 1, mRNA | GCCAGGCAAACATCC |
| SEQ ID | GI 224494751 NM_138801 Homo sapiens | TGGCTCCAGGCCATG |
| NO: 4561 | galactose mutarotase | TCTAATGACCAGCTC |
| | (GALM), mRNA | GATTCCCTGTGCAGT |
| | | TCAGAGGGCAAGTGA |
| SEQ ID | GI 342187247 NG_029422 Homo sapiens | AGCAGCTGTGGTCAG |
| NO: 4562 | major histocompatibility | GCTGCTGACCTTTCT |
| | complex, class 1, C | CTCAGGCCTTGTTCT |
| | (HLA-C), RefSeqGene on chromosome 6 | CTGCCTCACACTCAA |
| SEQ ID | GI 388490278 NG_032761 Homo sapiens | ACCATCCCTATCTAG |
| NO: 4563 | TNF alpha induced protein 3 | CAAGCCATGCCTGCT |
| | (TNFAIP3), RefSeqGene on chromosome 6 | TCCTGGTTTGTGCAT |
| | | GTTGCCCTGTGTGCT |
| SEQ ID | GI 156105692 NM_001037335 Homo sapiens | TGGAGGCTGCCCTTT |
| NO: 4564 | helicase with zinc finger 2 | GACCTTTGGACGCCA |
| | (HELZ2), transcript variant 1, mRNA | CCTGTAATCACTCTG |
| | | GATGGTGTCTGTGGA |
| SEQ ID | GI 567316248 NM_022128 Homo sapiens | AACCAGTGTGTCCAA |
| NO: 4565 | ribokinase | GCTGCTCGGCTTGGA |
| | (RBKS), transcript variant 1, mRNA | GCAATGACGTCCATG |
| | | GTGTGTAAGGTTGGC |
| SEQ ID | GI 527317409 NM_015077 Homo sapiens | TGTCATGGGTGCCCG |
| NO: 4566 | sterile alpha and TIR motif | CAACTTTGTGTTGGT |
| | containing 1 (SARM1), mRNA | GCTATCACCTGGAGC |
| | | ACTGGACAAGTGCAT |
| SEQ ID | GI 45238846 NM_006142 Homo sapiens | GAGGCCATGGCTGAT |
| NO: 4567 | stratifin | CTGCACACCCTCAGC |
| | (SFN), mRNA | GAGGACTCCTACAAA |
| | | GACAGCACCCTCATC |
| SEQ ID | GI 1049010976 AH002711 Homo sapiens | TGCTTGCCCATGTTT |
| NO: 4568 | platelet glycoprotein IIIa | GGCTACAAACACGTG |
| | (ITGB3) gene, complete cds | CTGACGCTAACTGAC |
| | | CAGGTGACCCGCTTC |
| SEQ ID | GI 182739 L10820 Human N-formyl | CCCATCCAATGGATG |
| NO: 4569 | peptide receptor | GAGAAGCACCTCCCA |
| | (FPR1) gene, complete cds | TCCATCTGGCCAAGG |
| | and Alu repeats | TAACCGCAGAGACGA |
| SEQ ID | GI 324021728 NG_028155 Homo sapiens | AGAGGGTCTTCAGCC |
| NO: 4570 | indoleamine 2,3-dioxygenase 1 | CTGCGTGTGCAGATG |
| | (IDO1), RefSeqGene on chromosome 8 | ACAAGACAGAGGCTG |
| | | GTGTTTCCAGACAGG |
| SEQ ID | GI 237858689 NG_012090 Homo sapiens | ACCAGGCCTGGTGCA |
| NO: 4571 | interleukin 13 | CGTGCTTTATGTGTC |
| | (IL13), RefSeqGene on chromosome 5 | ATTTCATCACTGCCA |
| | | GCCACCTCAAGAGGC |
| SEQ ID | GI 50345287 AY682848 Homo sapiens | GTCGGCTTCTCTCCC |
| NO: 4572 | receptor | TCCTTCCCCTGTACT |
| | (TNFRSF)-interacting serine- | TAGCAACAGATGGCA |
| | threonine kinase 1 | GCAGCATCTGCCCAA |
| | (RIPK1) gene, complete cds | |
| SEQ ID | GI 260593660 NG_013020 Homo sapiens | ATTAGGAGGGCTCAG |
| NO: 4573 | eosinophil peroxidase | GCCATCAACTGGAGC |
| | (EPX), RefSeqGene on chromosome 17 | TTGTGAAAGGGGTTG |
| | | CCGAAGAGAGGTGGT |
| SEQ ID | GI 1015224512 NG_023402 Homo sapiens | AGCCTCAGACCTGCA |
| NO: 4574 | Janus kinase 1 | ACATGGTTTTAAGGC |
| | (JAK1), RefSeqGene on chromosome 1 | TTTCCCTGCCCTCTC |
| | | CAGCTCCCTCTTCCT |
| SEQ ID | GI 71274112 NM_005946 Homo sapiens | CGTGCGCCTTATAGC |
| NO: 4575 | metallothionein 1A | CTCTCAACTTCTTGC |
| | (MT1A), mRNA | TTGGGATCTCCAACC |
| | | TCACCGCGGCTCGAA |
| SEQ ID | GI 289577082 NG_016598 Homo sapiens | TGCACTTCCCACATG |
| NO: 4576 | phosphorylase kinase | GCCCTAAGTGAGGTT |
| | regulatory subunit beta | GCTGGAGCAGAAGCT |
| | (PHKB), RefSeqGene on chromosome 16 | CCCAGAATCAGACCA |
| SEQ ID | GI 1015635417 AH006868 Homo sapiens | TGCAGCTTGCCGGGA |
| NO: 4577 | CD9 antigen | TTGCTGTCCTTGCCA |
| | (CD9) gene, complete cds | TTGGACTATGGCTCC |
| | | GATTCGACTCTCAGA |
| SEQ ID | GI 358679296 NG_031810 Homo sapiens | TGCGTGTCTGGTGTT |
| NO: 4578 | interferon regulatory factor 3 | GGGTGCCCTCTGACC |
| | (IRF3), RefSeqGene on chromosome 19 | CAATATGGTTGTTAT |
| | | TCCCGCTCAGGGTCT |
| SEQ ID | GI 164695782 AK315592 Homo sapiens | GCTGTAGCGAGGAGG |
| NO: 4579 | cDNA, FLI96670, Homo sapiens | ACCTGAAAGCCATCC |
| | toll interacting protein | AGGACATGTTCCCCA |
| | (TOLLIP), mRNA | ACATGGACCAGGAGG |
| SEQ ID | GI 262331544 NG_013350 Homo sapiens | TGCTTCCCTTGCCAC |
| NO: 4580 | nuclear receptor subfamily | CCGTAGGAACACTTG |
| | 3 group C member 2 | TTCTGATCCCTTCTA |
| | (NR3C2), RefSeqGene on chromosome 4 | GGAGCACAGGCTGCC |
| SEQ ID | GI 1060099004 NM_001330400 Homo sapiens | GCCAAGGGCACAGGG |
| NO: 4581 | sideroflexin 5 | AGAACCCAGATGGAG |
| | (SFXN5), transcript variant 1, mRNA | TAACTTCATGGAAGC |
| | | TGAGGACTTGGGCGA |
| SEQ ID | GI 164692348 AK314740 Homo sapiens | CCAGCCTGTTGCCAT |
| NO: 4582 | cDNA, FLI95602, Homo sapiens | GTCCCTCTCAGCAGA |
| | COMM domain containing 4 | CAAGTTCCAGGTCCT |
| | (COMMD4), mRNA | CCTGGCAGAACTGAA |
| SEQ ID | GI 164692857 AK313058 Homo sapiens | CCGTAGTGTTCGTCG |
| NO: 4583 | cDNA, FU93535, Homo sapiens | TGGGCTTGGTGGGCA |
| | opioid receptor, kappa 1 | ACTCGCTGGTCATGT |
| | (OPRK1), mRNA | TCGTGATCATCCGAT |
| SEQ ID | GI 403420573 NM_182619 Homo sapiens | GCCCAGCCTGACTCC |
| NO: 4584 | C-type lectin domain family 18 member A | TGGAGATTGTGAATA |
| | (CLEC18A), transcript variant 1, mRNA | GCTCCATCCAGCCTG |
| | | AGAAACAAGCCGGGT |
| SEQ ID | GI 1002341790 NM_000043 Homo sapiens | ACTTCTCCCATGTCA |
| NO: 4585 | Fas cell surface death receptor | ATGAGCACAGCCACA |
| | (FAS), transcript variant 1, mRNA | TTCCCGAGTTGAGGT |
| | | GACCCCACGGTCCAG |
| SEQ ID | GI 992699 U33447 Human putative | AAGCCCTGGTTCTGC |
| NO: 4586 | G-protein-coupled receptor | GTTTGCCTTGTGCTG |
| | (GPR17) gene, complete cds | AAGTTCAGAATGCCT |
| | | CTGACGCTCACGCAC |
| SEQ ID | GI 222144288 NG_009492 Homo sapiens | AGGTCTGGCCCCTTC |
| NO: 4587 | insulin like growth factor 1 receptor | ACTAGCTGCCCTCAC |
| | (IGF1R), RefSeqGene on chromosome 15 | TTCTGCAAGAAGGGA |
| | | AGAGTCAGAGCGAGA |
| SEQ ID | GI 1002095861 NG_046750 Homo sapiens | TCTGGGAAGTCCACC |
| NO: 4588 | cytochrome c oxidase subunit 8A | TCTGCAGCAGCATGT |
| | (COX8A), RefSeqGene on chromosome 11 | GTGGTGGCTAAAAGC |
| | | ATGGCTTTTGGAGGC |
| SEQ ID | GI 299758395 NG_011675 Homo sapiens | CAGTCCACCATCACT |
| NO: 4589 | glial cell derived neurotrophic factor | GATTACCGGCGCGGT |
| | (GDNF), RefSeqGene on chromosome 5 | TGCGGTGGATGCACT |
| | | TGAACCAAACCAGTG |
| SEQ ID | GI 15545992 AY029254 Homo sapiens | GTCATGCTGCCTTGT |
| NO: 4590 | Be 1-2 modifying factor | GGGGTGACTGAGGAA |
| | (BMF) mRNA, complete cds | CCCCAGCGACTCTTT |
| | | TATGGCAATGCTGGC |
| SEQ ID | GI 285026427 NG_016458 Homo sapiens | TCATCTTCCCCCACC |
| NO: 4591 | protein kinase AMP- | CCCATTTGCTGGTTC |
| | activated non-catalytic subunit gamma 3 | AGCTATGATTCAGGT |
| | (PRKAG3), RefSeqGene on chr [symbol] | AGGCTCTGCCCTGGG |
| SEQ ID | GI 238776808 NG_012244 Homo sapiens | GACCAGGTAGGGTGA |
| NO: 4592 | SMAD family member 6 | GGTTTGATTTGACAG |
| | (SMAD6), RefSeqGene on chromosome 15 | CAGCTGGCAGAGGTA |
| | | GTGCAGAGGGCTCGC |
| SEQ ID | GI 325053737 NG_028166 Homo sapiens | TTCAGGCAGTCCTGG |
| NO: 4593 | aminoacyl tRNA synthetase | GAGAAATGGATGGCT |
| | complex interacting | GGGATGTTCAAGGAA |
| | multifunctional protein 1 | CAGCAGGAGGCCGAT |
| | (AIMP1), RefSeqG [symbol] | |
| SEQ ID | GI 31563435 NM_144673 Homo sapiens | GGCCTGGCCTACCCA |
| NO: 4594 | CKLF like MARVEL | GAAACAGCAGGAGAG |
| | transmembrane domain containing 2 | AGAAGAAACAGGCCA |
| | (CMTM2), transcript variant 1, mRNA | GCTGTGAGAAGCCAA |
| SEQ ID | GI 299116025 NG_023038 Homo sapiens | ACCCCCCGCCAATTT |
| NO: 4595 | autophagy related 16 like 1 | GGTTCATCACAAAGA |
| | (ATG16L1), RefSeqGene on chromosome 2 | GTCCTGCATGGGCAT |
| | | TTTCCCACTGGGGAT |
| SEQ ID | GI 336285452 NM_006221 Homo sapiens | CGCATGAGCCGCAGC |
| NO: 4596 | peptidylprolyl cis/trans isomerase, | TCAGGCCGAGTGTAC |
| | NIMA-interacting 1 | TACTTCAACCACATC |
| | (PIN1), transcript variant 1, mRNA | ACTAACGCCAGCCAG |
| SEQ ID | GI 1147399622 NG_012448 Homo sapiens | GCTGGGACAAGGGAG |
| NO: 4597 | nodal growth differentiation factor | CATCCAGTGTGGCTT |
| | (NODAL), RefSeqGene on chromosome 10 | CTCAAGTCACAACGA |
| | | CTTAGGGCCCCTCAC |
| SEQ ID | GI 325495520 HQ692855 Homo sapiens | GGCTTCGGGGACTGG |
| NO: 4598 | nerve growth factor IB | ATTGACAGTATCCTG |
| | nuclear receptor variant 1 | GCCTTCTCAAGGTCC |
| | (NR4A1) mRNA, complete cds | CTGCACAGCTTGCTT |
| SEQ ID | GI 756140821 NM_014358 Homo sapiens | AAGAAGGAAGAGCAA |
| NO: 4599 | C-type lectin domain family 4 member E | GAACATGGCCACACC |
| | (CLEC4E), mRNA | CACCGCCCCACACGA |
| | | GAAATTTGTGCGCTG |
| SEQ ID | GI 189458805 NG_007981 Homo sapiens | TACCCAGCCTCCTTT |
| NO: 4600 | ATP binding cassette subfamily A member 1 | GTGTTCAAGATCCCC |
| | (ABCA1), RefSeqGene on chromosome 9 | AGCACAGCCTATGTG |
| | | GTGCTCACCAGCGTG |
| SEQ ID | GI 237820672 NG_012057 Homo sapiens | TGGGTGCAAAACCAC |
| NO: 4601 | carboxylesterase 1 | CACCTCTGCTGTCAT |
| | (CES1), RefSeqGene on chromosome 16 | GGTTCACTGCCTGCG |
| | | ACAGAAGACGGAAGA |
| SEQ ID | GI 38327624 NM_004077 Homo sapiens | GGCAGCAACATGGCA |
| NO: 4602 | citrate synthase | AGACGGTGGTGGGCC |
| | (CS), mRNA | AAATCACTGTGGACA |
| | | TGATGTATGGTGGCA |
| SEQ ID | GI 1036032480 AH002739 Homo sapiens | TCTGTTGCCCAGCCT |
| NO: 4603 | cholecystokinin | TTCAGTTAACGCGCC |
| | (CCK) gene, complete cds | CTCCTCCTTTGCTCC |
| | | CTACAGCCATGAACA |
| SEQ ID | GI 117606583 EF064766 Homo sapiens | GGAGCACAGTTCCTC |
| NO: 4604 | chemokine | ACTGTGGGCCCCACC |
| | (C-C motif) ligand 19 | TTTGACCATCACTTC |
| | (CCL19) gene, complete cds | TGAACCCCAGCTTCA |
| SEQ ID | GI 308522736 NG_027815 Homo sapiens | TTGTCGTGGCTTCCT |
| NO: 4605 | transketolase | ATGGACTCTAACTGA |
| | (TKT), RefSeqGene on chromosome 3 | TGTCCGGCCCCTGTT |
| | | GTGGCTCTGACCCCT |
| SEQ ID | GI 42794610 NM_012088 Homo sapiens | CCCGGGGCTCAACAC |
| NO: 4606 | 6-phosphogluconolactonase | ACAGGCTGTGGCTCT |
| | (PGLS), mRNA | GGACATCCGGATATT |
| | | AAAAGGAGCGTTGCT |
| SEQ ID | GI 8133099 AF266756 Homo sapiens | GGGCCCAGCTGCCTA |
| NO: 4607 | sphingosine kinase | TGTAAGGCCTTCTAG |
| | (SPHK1) mRNA, complete cds | TTTGTTTTGAGACCC |
| | | CCACCCCACGAACCA |
| SEQ ID | GI 194394200 NG_008275 Homo sapiens | GGGGGTTGCCAGAAG |
| NO: 4608 | prokineticin 2 | GTGTTGGGATGTGGA |
| | (PROK2), RefSeqGene on chromosome 3 | CAGGTTGAGTCACAC |
| | | TGCAGGGAGGTCTTC |
| SEQ ID | GI 323098322 NM_005624 Homo sapiens | AGGAGGTGAGCGGGA |
| NO: 4609 | C-C motif chemokine ligand 25 | GCTGCAATCTGCCTG |
| | (CCL25), transcript variant 1, mRNA | CTGCGATATTCTACC |
| | | TCCCCAAGAGACACA |
| SEQ ID | GI 223890186 NG_009797 Homo sapiens | TGCCCTTTCCCTAAC |
| NO: 4610 | junctophilin 3 | CCCATTCCCCAACAA |
| | (JPH3), RefSeqGene on chromosome 16 | GCCCTGTGGTTTTGA |
| | | CTGTGCGGTTTTGCA |
| SEQ ID | GI 62530382 NM_004281 Homo sapiens | GGTCCCAGTCACCTC |
| NO: 4611 | BCL2 associated athanogene 3 | TGCGGGGCATGCCAG |
| | (BAG3), mRNA | AAACCACTCAGCCAG |
| | | ATAAACAGTGTGGAC |
| SEQ ID | GI 22165426 NM_002991 Homo sapiens | CCAGCTGTCCAGCAG |
| NO: 4612 | C-C motif chemokine ligand 24 | GAGCACATGCCTCAA |
| | (CCL24), mRNA | GGCAGGAGTGATCTT |
| | | CACCACCAAGAAGGG |
| SEQ ID | GI 601984942 NG_034078 Homo sapiens | CACTCCTCCCCAAAT |
| NO: 4613 | myelin associated glycoprotein | TTCACCTCTCTGGTC |
| | (MAG), RefSeqGene on chromosome 19 | TTCACGATGCCCACA |
| | | ATGGCCCCCACCACA |
| SEQ ID | GI 401709925 NM_015953 Homo sapiens | GCCCAGTGTGGGTCC |
| NO: 4614 | nitric oxide synthase interacting protein | TCCAAGTAAGGACAA |
| | (NOSIP), transcript variant 1, mRNA | GGACAAAGTGCTGCC |
| | | CAGCTTCTGGATCCC |
| SEQ ID | GI 594591631 NG_034042 Homo sapiens | AGTGAAGGCCCAGCT |
| NO: 4615 | mitogen-activated protein kinase 11 | TCAAATGTGGCTGGA |
| | (MAPK11), RefSeqGene on chromosome 22 | TCCAGGCACACATCC |
| | | TGAGGTTCTGCTGGT |
| SEQ ID | GI 59853224 NM_001206 Homo sapiens | CCCAGGAAACAGACG |
| NO: 4616 | Kruppel like factor 9 | CGTGAAAACTGAGCC |
| | (KLF9), mRNA | CCAGAAGAGGCACAC |
| | | TTGACGGCACAGGAA |
| SEQ ID | GI 756761760 NM_152901 Homo sapiens | GCTCGGGCAGCTAGA |
| NO: 4617 | pyrin domain containing 1 | TATCGTGGACCTCAC |
| | (PYDC1), mRNA | CGACAAGCTGGTCGC |
| | | CTCCTACTACGAGGA |
| SEQ ID | GI 1024846751 NG_047008 Homo sapiens | AGGGGTGATGCTGCT |
| NO: 4618 | pyruvate dehydrogenase kinase 4 | GGTCCACAATGCACA |
| | (PDK4), RefSeqGene on chromosome 7 | CTTTGCCTAGCAGGC |
| | | CTGTAGAGTTGTGCT |
| SEQ ID | GI 14278710 AF374726 Homo sapiens | TTCCTGCCTCTCCCT |
| NO: 4619 | coagulation factor 11 receptor-like 2 | CACTGCACCCCAAAG |
| | (F2RL2) gene, complete cds | CCAATCAGACACCAA |
| | | GTCCCTTTAAGCCGC |
| SEQ ID | GI 95147553 NM_003956 Homo sapiens | CGCCCTTCTTCCCGG |
| NO: 4620 | cholesterol 25-hydroxylase | TCATCTTCTCCATCA |
| | (CH25H), mRNA | CCACATACGTGGGCT |
| | | TTTGCCTGCCCTTCG |
| SEQ ID | GI 40288420 AY505111 Homo sapiens | AAGACCTGGTGCCTT |
| NO: 4621 | arachidonate 15-lipoxygenase | TCCTGCTGTCAGCCC |
| | (ALOX15) gene, complete cds | TTGTTTCCTGCAGGG |
| | | ATCTTGCAGCTCTCC |
| SEQ ID | GI 45243506 NM_002935 Homo sapiens | GTTTGCCATCCAGCA |
| NO: 4622 | ribonuclease A family member 3 | CATCAGTCTGAACCC |
| | (RNASE3), mRNA | CCCTCGATGCACCAT |
| | | TGCAATGCGGGCAAT |
| SEQ ID | GI 296010927 NM_172213 Homo sapiens | CTTCGGGAAGGGAAC |
| NO: 4623 | CD8b molecule | TCAGCTGAGTGTGGT |
| | (CD8B), transcript variant 2, mRNA | TGATTTCCTTCCCAC |
| | | CACTGCCCAGCCCAC |
| SEQ ID | GI 18073363 AJ277883 Homo sapiens | ACCGCCTAGAGTGTT |
| NO: 4624 | mRNA for sialidase | TTGGCAAGATCTGCC |
| | (NEU4 gene) | GGACCAGCCCTCACT |
| | | CCTTCGCCTTCTACA |
| SEQ ID | GI 63054827 NM_001915 Homo sapiens | ACACAGCTGGTGCGG |
| NO: 4625 | cytochrome b561 | GATCCTTGTCTTTGT |
| | (CYB561), transcript variant 1, mRNA | CCTGTACTTTGTGCA |
| | | GTGGCTGGTGGGCTT |
| SEQ ID | GI 478431032 NM_003693 Homo sapiens | GCAACGCCTCCTGCC |
| NO: 4626 | scavenger receptor class F member 1 | CAGCCGGTTTCCATG |
| | (SCARF1), transcript variant 1, mRNA | GAAACAACTGCTCAG |
| | | TTCCTTGTGAATGCC |
| SEQ ID | GI 216548280 NG_009104 Homo sapiens | ATGCATCACCGTTGG |
| NO: 4627 | retinol binding protein 4 | CTCCCCAGACACTGC |
| | (RBP4), RefSeqGene on chromosome 10 | TGGGACTCAAATGGG |
| | | TGCAAGAGTGAAGGG |
| SEQ ID | GI 227430281 NM_182983 Homo sapiens | CCAGGGAATCATTAA |
| NO: 4628 | hepsin | CAAGAGGCAGTGACA |
| | (HPN), transcript variant 1, mRNA | TGGCGCAGAAGGAGG |
| | | GTGGCCGGACTGTGC |
| SEQ ID | GI 27477078 NM_013278 Homo sapiens | AGCGCTCCATCTCAC |
| NO: 4629 | interleukin 17C | CCTGGAGATACCGTG |
| | (IL17C), mRNA | TGGACACGGATGAGG |
| | | ACCGCTATCCACAGA |
| SEQ ID | GI 62865623 NM_198057 Homo sapiens | GGGGATGGCTTTGAT |
| NO: 4630 | TSC22 domain family member 3 | CCAATGGAGCCTGGG |
| | (TSC22D3), transcript variant 1, mRNA | AGGTGTGCCCAGAAA |
| | | GCTTGTCTGTAGCGG |
| SEQ ID | GI 22165426 NM_002991 Homo sapiens | GGGTCCAGAGGTACA |
| NO: 4631 | C-C motif chemokine ligand 24 | TGAAGAACCTGGACG |
| | (CCL24), mRNA | CCAAGCAGAAGAAGG |
| | | CTTCCCCTAGGGCCA |
| SEQ ID | GI 190341054 NG_008010 Homo sapiens | GGCCTTCCCACCTTC |
| NO: 4632 | aldolase, fructose-bisphosphate A | CCCACAGAGGGCTGC |
| | (ALDOA), RefSeqGene on chromosome 16 | AAGAACTTTCAAACC |
| | | TGGAGACATCAGGCC |
| SEQ ID | GI 231570519 NG_012004 Homo sapiens | GCCCAGCAAAAGCAG |
| NO: 4633 | kinase insert domain receptor | GGAGTCTGTGGCATC |
| | (KDR), RefSeqGene on chromosome 4 | TGAAGGCTCAAACCA |
| | | GACAAGCGGCTACCA |
| SEQ ID | GI 1027853651 NM_182828 Homo sapiens | AGGAGGATCACCCAC |
| NO: 4634 | growth differentiation factor 7 | ACTGGCAGGCGGGCA |
| | (GDF7), mRNA | TTTCCACTGATTCCC |
| | | AAACACACTTGCCTT |
| SEQ ID | GI 83267865 NM_001037494 Homo sapiens | GCGCCTCAGTTTCTC |
| NO: 4635 | dynein light chain LC8-type 1 | TCTGTGGCGCCGCCT |
| | (DYNLL1), transcript variant 1, mRNA | ACCTCACAGACTTGT |
| | | GAGCACTCACTGACG |
| SEQ ID | GI 169808406 NG_007450 Homo sapiens | GCCCATCCTGGGAAG |
| NO: 4636 | leptin | GAAAATGCATTGGGG |
| | (LEP), RefSeqGene on chromosome 7 | AACCCTGTGCGGATT |
| | | CTTGTGGCTTTGGCC |
| SEQ ID | GI 11691883 AB034990 Homo sapiens | GTGGCCCGAAGCAGT |
| NO: 4637 | HERPUD1 gene for stress | AGTTCTCAACTGGGG |
| | protein Herp, complete cds | GTGGTTTTGTACCCT |
| | | CTCTCCCCAGGGGAC |
| SEQ ID | GI 81230484 NM_001037161 Homo sapiens | GGGCAGAGTTGCAGG |
| NO: 4638 | acyl-CoA thioesterase 1 | GGTCTCCACAGCTGA |
| | (ACOT1), mRNA | GGCAGTTTGGCCGGA |
| | | TTATTTGGGTTCCTG |
| SEQ ID | GI 296080750 NM_002704 Homo sapiens | TCATGCCTTGCAGGT |
| NO: 4639 | pro-platelet basic protein | GCTGCTGCTTCTGTC |
| | (PPBP), mRNA | ATTGCTGCTGACTGC |
| | | TCTGGCTTCCTCCAC |
| SEQ ID | GI 315360648 NG_028024 Homo sapiens | TGACCCCCTCATCAT |
| NO: 4640 | glucokinase regulator | GCCCTTCTCTCTCTT |
| | (GCKR), RefSeqGene on chromosome 2 | CACCATCAGGCTCCC |
| | | TTTGTGGCAGGCCAG |
| SEQ ID | GI 342307092 NM_001716 Homo sapiens | CGCCAAAGTCAGCCA |
| NO: 4641 | C-X-C motif chemokine receptor 5 | AGGCCATCACAACAA |
| | (CXCR5), transcript variant 1, mRNA | CTCCCTGCCACGTTG |
| | | CACCTTCTCCCAAGA |
| SEQ ID | GI 325652058 NM_005524 Homo sapiens | GCTTCAGCGAGTGCA |
| NO: 4642 | hes family bHLH transcription factor 1 | TGAACGAGGTGACCC |
| | (HES1), mRNA | GCTTCCTGTCCACGT |
| | | GCGAGGGCGTTAATA |
| SEQ ID | GI 55775471 NM_004271 Homo sapiens | CGGTCCACCGTGGCC |
| NO: 4643 | lymphocyte antigen 86 | TGTGCCAATGCTACT |
| | (LY86), mRNA | ATCATGTGCTCCTGA |
| | | CTGTGGCCTGTAGCA |
| SEQ ID | GI 78190493 NM_013434 Homo sapiens | GGCCGCATGGCCCCT |
| NO: 4644 | potassium voltage-gated | CCAGGAACATTCCCA |
| | channel interacting protein 3 | CATAATACATTCCAT |
| | (KCNIP3), transcript variant 1, mRNA | CACAGCCAGCCCAGC |
| SEQ ID | GI 48928023 NM_003225 Homo sapiens | ACTCGGGGTCGCCTT |
| NO: 4645 | trefoil factor 1 | TGGAGCAGAGAGGAG |
| | (TFF1), mRNA | GCAATGGCCACCATG |
| | | GAGAACAAGGTGATC |
| SEQ ID | GI 1049010968 AH002726 Homo sapiens | TGGTCCCCCAGGTAG |
| NO: 4646 | c-fgr peptide | CTGAGGGCATGGCCT |
| | (FGR) gene, complete cds | ACATGGAACGCATGA |
| | | ACTACATTCACCGCG |
| SEQ ID | GI 7407497 AF243044 Homo sapiens | TGGCTGTGTACAACC |
| NO: 4647 | ECSIT | AGCTGCTCAACATCT |
| | (ECSIT) mRNA, complete cds | TCCCCAAGGAGGTCT |
| | | TCCGGCCTCGCAACA |
| SEQ ID | GI 523498696 NM_002981 Homo sapiens | AAGCTGCTCCAGGAA |
| NO: 4648 | C-C motif chemokine ligand 1 | GGCCCAAGCCAGACC |
| | (CCL1), mRNA | AGAAGACATGCAGAT |
| | | CATCACCACAGCCCT |
| SEQ ID | GI 584277161 NG_008225 Homo sapiens | CCAGCCTCTTCTGGC |
| NO: 4649 | POU class 1 homeobox 1 | AGAGGACCCCACAGC |
| | (POU1F1), RefSeqGene on chromosome 3 | TGCTGATTTCAAGCA |
| | | GGAACTCAGGCGGAA |
| SEQ ID | GI 164692348 AK314740 Homo sapiens | ACAGTGGCAGTGCTG |
| NO: 4650 | cDNA, FLI95602, Homo sapiens | AGTTTCATCCTCTCC |
| | COMM domain containing 4 | AGTGCGGCCAAGCAC |
| | (COMMD4), mRNA | AGTGTCGATGGCGAA |
| SEQ ID | GI 125661056 NM_005195 Homo sapiens | CCACCCTGGAGCTGT |
| NO: 4651 | CCAAT/enhancer binding protein delta | GCCACGACGAGCTCT |
| | (CEBPD), mRNA | TCGCCGACCTCTTCA |
| | | ACAGCAATCACAAGG |
| SEQ ID | GI 40786798 AY518533 Homo sapiens | CGGCGAAGGGCCTGG |
| NO: 4652 | interleukin 17 receptor B | CACGTAGTTATTGTT |
| | (IL17RB) gene, complete cds | ACTTGGGGTCTGCTC |
| | | ACCTGTTGGGGCACA |
| SEQ ID | GI 75677324 NM_014238 Homo sapiens | AGCTGCAAGCAAGAG |
| NO: 4653 | kinase suppressor of ras 1 | ACTGGCCCTTGAAGA |
| | (KSR1), mRNA | ACCAGGCTGCAGAGG |
| | | CATCCATCTGGCAGA |
| SEQ ID | GI 125661056 NM_005195 Homo sapiens | CGGCGCAACCAGGAG |
| NO: 4654 | CCAAT/enhancer binding protein delta | ATGCAGCAGAAGTTG |
| | (CEBPD), mRNA | GTGGAGCTGTCGGCT |
| | | GAGAACGAGAAGCTG |
| SEQ ID | GI 325652112 NM_020997 Homo sapiens | ACACCCTGGACCTTG |
| NO: 4655 | left-right determination factor 1 | GGGACTATGGAGCTC |
| | (LEFTY1), mRNA | AGGGCGACTGTGACC |
| | | CTGAAGCACCAATGA |
| SEQ ID | GI 224282141 NG_009873 Homo sapiens | ATGGGTCCGCAGACT |
| NO: 4656 | CREB binding protein | TCCTCTGCAAAGGGC |
| | (CREBBP), RefSeqGene on chromosome 16 | CAGAGAGCACGCATT |
| | | TGGCTTTCTGAGCCA |
| SEQ ID | GI 205277450 NM_001135054 Homo sapiens | GCTCCCAAAGGCGCA |
| NO: 4657 | single Ig and TIR domain containing | CCAATGACCAACATT |
| | (SIGIRR), transcript variant 1, mRNA | TGCCCCCCGGAGGAA |
| | | AGAACTGGAACCAGC |
| SEQ ID | GI 156151447 NG_006672 Homo sapiens | GGTCCTCCCACCTCA |
| NO: 4658 | actin, alpha 1, skeletal muscle | GCCTCCCCAGTTGCT |
| | (ACTA1), RefSeqGene on chromosome 1 | AATATTTTCGCATGT |
| | | GCCACCGCGTCCAGC |
| SEQ ID | GI 756761760 NM_152901 Homo sapiens | AACGAAGCGCGAGGC |
| NO: 4659 | pyrin domain containing 1 | CATCCTGAAGGTGCT |
| | (PYDC1), mRNA | GGAGAACCTGACACC |
| | | GGAGGAGCTCAAGAA |
| SEQ ID | GI 151101190 NM_006435 Homo sapiens | CCCTGCCCCCAGAGG |
| NO: 4660 | interferon induced | CCAGGAGCTCTGCCC |
| | transmembrane protein 2 | TTGACCTGTATTCCA |
| | (IFITM2), mRNA | CTTACTCCACCTTCC |
| SEQ ID | GI 18034675 AF458059 Homo sapiens | CCCACAAGGGCTACT |
| NO: 4661 | IL25 mRNA, complete cds | GCCTGGAGCGCAGGC |
| | | TGTACCGTGTTTCCT |
| | | TGGCTTGTGTGTGTG |
| SEQ ID | GI 31343499 NM_175886 Homo sapiens | GCGGCAGCTGGATCG |
| NO: 4662 | phosphoribosyl pyrophosphate | CTCGACGGAGTGCCT |
| | synthetase 1-like 1 | CTGGTAGTTGGCCAA |
| | (PRPS1L1), mRNA | GACGCCGAATATCAA |
| SEQ ID | GI 18034675 AF458059 Homo sapiens | ACCAGGTGGTTGCAT |
| NO: 4663 | IL25 mRNA, complete cds | TCTTGGCAATGGTCA |
| | | TGGGAACCCACACCT |
| | | ACAGCCACTGGCCCA |
| SEQ ID | GI 54144649 NM_002090 Homo sapiens | CTCCGGGAATTTCCC |
| NO: 4664 | C-X-C motif chemokine ligand 3 | TGGCCCGGCCGCTCC |
| | (CXCL3), mRNA | GGGCTTTCCAGTCTC |
| | | AACCATGCATAAAAA |
| SEQ ID | GI 528078360 NM_003955 Homo sapiens | AGCCTGCGCCTCAAG |
| NO: 4665 | suppressor of cytokine signaling 3 | ACCTTCAGCTCCAAG |
| | (SOCS3), mRNA | AGCGAGTACCAGCTG |
| | | GTGGTGAACGCAGTG |
| SEQ ID | GI 4455060 AF118265 Homo sapiens | CCGGGACACCATCTC |
| NO: 4666 | orphan G protein-coupled | GCGGCTGGACGGGCG |
| | receptor GPR44 | CATTATGTGCTACTA |
| | (GPR44) gene, complete cds | CAATGTGCTGCTCCT |
| SEQ ID | GI 1049010968 AH002726 Homo sapiens | TCCCCTAGAGGTGAA |
| NO: 4667 | c-fgr peptide | TGACGGGCTGTGCAA |
| | (FGR) gene, complete cds | CCTGCTCATCGCGCC |
| | | CTGCACCATCATGAA |
| SEQ ID | GI 11545840 NM_022120 Homo sapiens | GGTCCGTCGCATCGT |
| NO: 4668 | 3-oxoacid CoA-transferase 2 | CTGTTCCTACGTGGG |
| | (OXCT2), mRNA | CGAGAACACCCTGTG |
| | | CGAGAGCCAGTACCT |
| SEQ ID | GI 954170001 NM_002620 Homo sapiens | TGCTCCTGCCAGTTG |
| NO: 4669 | platelet factor 4 variant 1 | TGGTCGCCTTCGCCA |
| | (PF4V1), mRNA | GAGCTGAAGCTGAAG |
| | | AAGATGGGGACCTGC |
| SEQ ID | GI 1036032447 AH002989 Homo sapiens | CGTCCACCGGGACCT |
| NO: 4670 | pp60 c-src-1 protein | TCGTGCAGCCAACAT |
| | (SRC) gene, complete cds | CCTGGTGGGAGAGAA |
| | | CCTGGTGTGCAAAGT |
| SEQ ID | GI 49574517 NM_003695 Homo sapiens | CCTTCCCCCCAGGGA |
| NO: 4671 | lymphocyte antigen 6 family member D | AGGCCCCTCATGCCT |
| | (LY6D), mRNA | TTCCTTCCCTTTCTC |
| | | TGGGGATTCCACACC |

[symbol]

indicates data missing or illegible when filed

The application's sequence listing, which the Patent Office published only in electronic form, follows.

SEQUENCE LISTING (4671 sequences)

SEQ ID NO: 1 - DNA, 60 bp, Artificial Sequence
  Probe
ggttcaacctcaattagagatggaacttacaccagttgttcagactattgaagtgaatag

SEQ ID NO: 2 - DNA, 60 bp, Artificial Sequence
  Probe
aggccgctataacaatactagatggaatttcacagtattcactgagactcattgatgcta

SEQ ID NO: 3 - DNA, 60 bp, Artificial Sequence
  Probe
aaaaactttgcaaccagtatctgaattacttacaccactgggcattgatttagatgagtg

SEQ ID NO: 4 - DNA, 60 bp, Artificial Sequence
  Probe
attatgactgtgtctctttttgttacatgcaccatatggaattaccaactggagttcatg

SEQ ID NO: 5 - DNA, 60 bp, Artificial Sequence
  Probe
cggtaattatacagtttcctgtttaccttttacaattaattgccaggaacctaaattggg

SEQ ID NO: 6 - DNA, 60 bp, Artificial Sequence
  Probe
ttagtcgtcgttaattcccaagatgtctataagagtcttaccatagttgacattccacag

SEQ ID NO: 7 - DNA, 58 bp, Artificial Sequence
  Probe
aaaccgttctgcaatgtgtaattggtgcttgattagccaagattccataactcactac

SEQ ID NO: 8 - DNA, 60 bp, Artificial Sequence
  Probe
agtgtttgctacactcctatagatgagataccctataagagtttctctgatagtggttgc

SEQ ID NO: 9 - DNA, 60 bp, Artificial Sequence
  Probe
atccacttctgccgttaagttgcaaaataatgagatcaaaccttcaggtctaaaaaccat

SEQ ID NO: 10 - DNA, 60 bp, Artificial Sequence
  Probe
agtctgcttgtattgaggttgatatacaacagactttctttgataaaacttggcctaggc

SEQ ID NO: 11 - DNA, 60 bp, Artificial Sequence
  Probe
cacaaagtgctaatcctatggtgattgtaaatgctgctaacatacacctgaaacatggtg

SEQ ID NO: 12 - DNA, 60 bp, Artificial Sequence
  Probe
aacttgtgctacaactagacaggttgtcaatgtcataactactaaaatctcactcaaggg

SEQ ID NO: 13 - DNA, 60 bp, Artificial Sequence
  Probe
agttgcctcttggtattaacattacaaattttagagccattcttacagccttttcacctg

SEQ ID NO: 14 - DNA, 58 bp, Artificial Sequence
  Probe
ctgagcatagtcttgccgaataccataatgaatctggcttgaaaaccattcttcgtaa

SEQ ID NO: 15 - DNA, 60 bp, Artificial Sequence
  Probe
ttttggtgctgaccctatacattctttaagagtttgtgtagatactgttcgcacaaatgt

SEQ ID NO: 16 - DNA, 60 bp, Artificial Sequence
  Probe
tgtatggaaaagttatgtgcatgttgtagacggttgtaattcatcaacttgtatgatgtg

SEQ ID NO: 17 - DNA, 60 bp, Artificial Sequence
  Probe
cactgagactcattgatgctatgatgttcacatctgatttggctactaacaatctagttg

SEQ ID NO: 18 - DNA, 56 bp, Artificial Sequence
  Probe
agaatttgactaaagaaggtgccactacttgtggttacttaccccaaaatgctgtt

SEQ ID NO: 19 - DNA, 45 bp, Artificial Sequence
  Probe
aaaattttaacgctcaccccacgcaacaagtggagtggcgtttct

SEQ ID NO: 20 - DNA, 60 bp, Artificial Sequence
  Probe
tggttccctaacacagattaatactacattactcgatcttacctacgagatgttgtctct

SEQ ID NO: 21 - DNA, 56 bp, Artificial Sequence
  Probe
taagcctgtgtatagagttaacacggcaatccctactattaaggattggcttctcg

SEQ ID NO: 22 - DNA, 48 bp, Artificial Sequence
  Probe
ttatctctactgctcgtgatggcgtaaggcgaggcgataacttccata

SEQ ID NO: 23 - DNA, 48 bp, Artificial Sequence
  Probe
aactgtagcataacctctggcgtgttgcaaagcggtttggtgaaaatg

SEQ ID NO: 24 - DNA, 60 bp, Artificial Sequence
  Probe
cccaacactcaatatctcagatgagttttctagcaatgttgcaaattatcaaaaggttgg

SEQ ID NO: 25 - DNA, 60 bp, Artificial Sequence
  Probe
tttaaggaaggaagttctgttgaattaaaacacttcttctttgctcaggatggtaatgct

SEQ ID NO: 26 - DNA, 60 bp, Artificial Sequence
  Probe
agcacaagtagatgtagttaactttaatctcacatagcaatctttaatcagtgtgtaaca

SEQ ID NO: 27 - DNA, 60 bp, Artificial Sequence
  Probe
tgaggatcaagatgcacttttcgcatatacaaaacgtaatgtcatccctactataactca

SEQ ID NO: 28 - DNA, 60 bp, Artificial Sequence
  Probe
ctttattatgattcaatgagttatgaggatcaagatgcacttttcgcatatacaaaacgt

SEQ ID NO: 29 - DNA, 60 bp, Artificial Sequence
  Probe
ctatgacttctatgtataagcaagcacgtgctgaagacaagaaagcaaaaattgtcagtg

SEQ ID NO: 30 - DNA, 60 bp, Artificial Sequence
  Probe
gggtctacttacagtatatagaaaaactgtataaagaccttacaggacacatgcttgaca

SEQ ID NO: 31 - DNA, 60 bp, Artificial Sequence
  Probe
acacatagggattgtgattttaataaaccactcattgagtggccacttactgagtatgat

SEQ ID NO: 32 - DNA, 60 bp, Artificial Sequence
  Probe
aatctctggtctacttttacaaaagttcaaggtttggaaaacattgcttttaatgttgtt

SEQ ID NO: 33 - DNA, 60 bp, Artificial Sequence
  Probe
catggagaaagactttctatcttttgatagtgatgttttcattaagaagtatggcttgga

SEQ ID NO: 34 - DNA, 60 bp, Artificial Sequence
  Probe
aactttcgatctcttgtagatctgttctctaaacgaactttaaaatctgtgtggctgtca

SEQ ID NO: 35 - DNA, 60 bp, Artificial Sequence
  Probe
tacaaccagaactcaattaccccctgcatacactaattctttcacacgtggtgtttatta

SEQ ID NO: 36 - DNA, 60 bp, Artificial Sequence; identical to SEQ ID NO: 5
  Probe

SEQ ID NO: 37 - DNA, 60 bp, Artificial Sequence
  Probe
actatgaccaatagacagtttcatcaaaaattattgaaatcaatagccgccactagagga

SEQ ID NO: 38 - DNA, 60 bp, Artificial Sequence
  Probe
tttcatcttccttctttggatctatttggcctctcaaatgaactgagattcctgttaaaa

SEQ ID NO: 39 - DNA, 60 bp, Artificial Sequence
  Probe
gggatgatcgtgtatttatttttttacttcctcagctgtagacaggtccttttcgatggt

SEQ ID NO: 40 - DNA, 60 bp, Artificial Sequence
  Probe
gagtttgaaagagcgggctaagcatattgaatgtggtctcacattaagaacaaaatctgg

SEQ ID NO: 41 - DNA, 60 bp, Artificial Sequence
  Probe
ctctatgacctcatctaaccttcattaactccttaaaggccctatctccaaatacaggca

SEQ ID NO: 42 - DNA, 60 bp, Artificial Sequence
  Probe
gaaacacagggagagaaacatgttcccagtgttgatatttgaaagctgatctgttttgtc

SEQ ID NO: 43 - DNA, 60 bp, Artificial Sequence
  Probe
cattaggaaggaaaggaacagaaaatgaaccaacctgagtgttaggagacttgcatctag

SEQ ID NO: 44 - DNA, 60 bp, Artificial Sequence
  Probe
gaaacgttttaattttcaatgaagtcactgaaaatccaactccaggagctatggcagtgt

SEQ ID NO: 45 - DNA, 60 bp, Artificial Sequence
  Probe
ttagagtccagcttgtaatggttctttacacatcagtcacaagttacagctgtgacaatg

SEQ ID NO: 46 - DNA, 60 bp, Artificial Sequence
  Probe
atagaagagtagactgcacagtatcagtagtgtgacctccagagagtacttaaccctttc

SEQ ID NO: 47 - DNA, 60 bp, Artificial Sequence
  Probe
gaataaaatggctggttcttttgttttccaaaccagagtgtctgttgtcctttctctctg

SEQ ID NO: 48 - DNA, 60 bp, Artificial Sequence
  Probe
gaaacatcttggaaacttccaaaaagaccaaagtgctccacaaaatgtaccctcactaag

SEQ ID NO: 49 - DNA, 60 bp, Artificial Sequence
  Probe
caagtagttcctaccacacctgagtttatgtcaatgaagtgacttttggaaagccttagg

SEQ ID NO: 50 - DNA, 60 bp, Artificial Sequence
  Probe
tacgctatgggatactggcaaaagtgcacatatttcataaccaaattagtagcaccagtc

SEQ ID NO: 51 - DNA, 60 bp, Artificial Sequence
  Probe
cacagacaacatttatagaacacatactgtgtgccaggctttatgctgagagttcatcat

SEQ ID NO: 52 - DNA, 60 bp, Artificial Sequence
  Probe
ctctcagctgatgtgtcctgtacacagtgggaagattttagttcacacttagtctaactc

SEQ ID NO: 53 - DNA, 60 bp, Artificial Sequence
  Probe
caacatcgaaatgattctcattgactagtacaccatttcacacttcttgagttctgccgt

SEQ ID NO: 54 - DNA, 60 bp, Artificial Sequence
  Probe
tagacattttcatatgcactggatggagttagggaaactgaggcaaaagaatttgccata

SEQ ID NO: 55 - DNA, 60 bp, Artificial Sequence
  Probe
agaggttggctttcaattctgtagcatacttggagaaactgcattatcttaaaaggcagt

SEQ ID NO: 56 - DNA, 60 bp, Artificial Sequence
  Probe
ctgattcagcggatctagaatgagacacaagaatgtgcttagcatcactagcaagttttc

SEQ ID NO: 57 - DNA, 60 bp, Artificial Sequence
  Probe
caagggtaaccattgacttagcagtctcattttagctgtcatttctgtcaagactgatgg

SEQ ID NO: 58 - DNA, 60 bp, Artificial Sequence
  Probe
ggaacgcttccagctctttgagacggatattgtgaacatcattagcaatatcagttacac

SEQ ID NO: 59 - DNA, 60 bp, Artificial Sequence
  Probe
cctaaccttcattcttagttttacactagcatcgtgctcatatgtgcgacaagcaagaag

SEQ ID NO: 60 - DNA, 60 bp, Artificial Sequence
  Probe
tagtgccaacagtagtgagcatgaaatgaaactattcaaaagagaatatggcctgtgcat

SEQ ID NO: 61 - DNA, 60 bp, Artificial Sequence
  Probe
ctttagggatctagctcttcgagtggatcaaataagggataacatggctggatgaaagaa

SEQ ID NO: 62 - DNA, 60 bp, Artificial Sequence
  Probe
ctttaatttggagacactccaccacaaacttttcactttagaggtagcttgccatctctc

SEQ ID NO: 63 - DNA, 60 bp, Artificial Sequence
  Probe
atggtcattcttctcttttctgcctgagagtaggtggaataggagatctgtattactcca

SEQ ID NO: 64 - DNA, 60 bp, Artificial Sequence
  Probe
aatcaagagccaaagtcattctttctcagagaagggaagactgtccatatggatctcttc

SEQ ID NO: 65 - DNA, 60 bp, Artificial Sequence
  Probe
ctcatactggagacttttctaatgactgtgctgacacgaatgtactaccgaaggaaagac

SEQ ID NO: 66 - DNA, 60 bp, Artificial Sequence
  Probe
gacaagagttgtaacttgggctctgaagaaaggaaacaaggcaatttatggggaaaattg

SEQ ID NO: 67 - DNA, 60 bp, Artificial Sequence
  Probe
aatttccatataccaaacaaatcagggagccaccgtaggagagtagtgtgttatgagaaa

SEQ ID NO: 68 - DNA, 60 bp, Artificial Sequence
  Probe
ttcataagaaaggcattggtatcaccaaagcactttgcaagagaggcttagggttatatg

SEQ ID NO: 69 - DNA, 60 bp, Artificial Sequence
  Probe
ctatacaacaaccacaattacactgattgcacttctgagggcagaagagacaacatgaag

SEQ ID NO: 70 - DNA, 60 bp, Artificial Sequence
  Probe
atgctatgtcaagactgttgaagaagtatgatgtattgtttgcactcccagcaaattgga

SEQ ID NO: 71 - DNA, 60 bp, Artificial Sequence
  Probe
ggtaaggtgaccaagagctctagtttgcttaactctgtcccagatttagtactgaaatcc

SEQ ID NO: 72 - DNA, 60 bp, Artificial Sequence
  Probe
ttttacatctcttagcatggaggacgaagaaagctgtacattgttgcttgagagtctgta

SEQ ID NO: 73 - DNA, 60 bp, Artificial Sequence
  Probe
caatttcctgtccaatcacagatggtcacatgctgctttcctgagttaacctattaactc

SEQ ID NO: 74 - DNA, 60 bp, Artificial Sequence
  Probe
tttagagagttttggtgtgtgtggtaaggggatgaggagtctggctaattaattgatgat

SEQ ID NO: 75 - DNA, 60 bp, Artificial Sequence
  Probe
agtggaggatttaggactaagggattgctaaggaaggaaaataaggagtcttgctctttg

SEQ ID NO: 76 - DNA, 60 bp, Artificial Sequence
  Probe
gaaagagcatatgaaggcagttaagtaaggcaggaaagagctttatttgaggcactgaaa

SEQ ID NO: 77 - DNA, 60 bp, Artificial Sequence
  Probe
ccaaatatttcaaaatctgaagccatgagccttcatacatggactgagagtcagagcttg

SEQ ID NO: 78 - DNA, 60 bp, Artificial Sequence
  Probe
aggttcttcctaaaacttagcccattctagtctctcttaggtgagttgactatcaaccca

SEQ ID NO: 79 - DNA, 60 bp, Artificial Sequence
  Probe
aattaccaatgggaaagctaaggtgagttccaagtttggcttcaccagagaaaactaatt

SEQ ID NO: 80 - DNA, 60 bp, Artificial Sequence
  Probe
accactttatttctttttgttcccctttgcttcattcaagtcagctcttctccatcctac

SEQ ID NO: 81 - DNA, 60 bp, Artificial Sequence
  Probe
tttgccatataacacttgcacatgtgactctggtcaattcaaaagactcttatttcggct

SEQ ID NO: 82 - DNA, 60 bp, Artificial Sequence
  Probe
gtagagctctttttggtaccattgattcatggcttatctggagtttgacaggaggagtta

SEQ ID NO: 83 - DNA, 60 bp, Artificial Sequence
  Probe
gtattacaactgtgaaccaaacggataaggccctaaccattttcagcattctctttggat

SEQ ID NO: 84 - DNA, 60 bp, Artificial Sequence
  Probe
cttattcttctctccaagctgggttaacagtagacaggacccatttctgtgtgatgttag

SEQ ID NO: 85 - DNA, 60 bp, Artificial Sequence
  Probe
aagtcatttcctctctacggagtattagtagcttaatgggtgctttctcaggttcctgta

SEQ ID NO: 86 - DNA, 60 bp, Artificial Sequence
  Probe
agaaacgtgagactcctgattgcttctggaaatactgtgtctgaagtgaaataagcatct

SEQ ID NO: 87 - DNA, 60 bp, Artificial Sequence
  Probe
tcagatatgttctatgtggaagtgcagttagatcctgcaggacagctttgtgatgtaaaa

SEQ ID NO: 88 - DNA, 60 bp, Artificial Sequence
  Probe
agtccagaatctgctacaagatgactttggtatcaaacccggaataatctttgctgagat

SEQ ID NO: 89 - DNA, 60 bp, Artificial Sequence
  Probe
tagattcaggagattgtatttccctagcatccaacaggcatgtccaaatgtcatctcttt

SEQ ID NO: 90 - DNA, 60 bp, Artificial Sequence
  Probe
gtttcctttattgcagtctttgagctctgtttcctattctgaaagcataatgcccaggaa

SEQ ID NO: 91 - DNA, 60 bp, Artificial Sequence
  Probe
aaagaaaaaaaatcattgctttgaagcagttgtgtcagctactgcggaaaaggaaggaaa

SEQ ID NO: 92 - DNA, 60 bp, Artificial Sequence
  Probe
tttcacatggtagttgaagtaccacgctggtctaatgcaaaaatggagattgctacaaag

SEQ ID NO: 93 - DNA, 60 bp, Artificial Sequence
  Probe
ctgtggtgttagttacttctgagaggacagcttgctgccagagctctattttttatgtta

SEQ ID NO: 94 - DNA, 60 bp, Artificial Sequence
  Probe
atgagaatatgcaggtcatactggggaggggaatatctggttgtatagttcagctgaata

SEQ ID NO: 95 - DNA, 60 bp, Artificial Sequence
  Probe
ctgaagacactgggtacatctgttatggtccctgtgtacactcggatattctaaatgaga

SEQ ID NO: 96 - DNA, 60 bp, Artificial Sequence
  Probe
cttcgagatgtgtggtttggacgaattccaacttgtttcacgctatatcaggatgagata

SEQ ID NO: 97 - DNA, 60 bp, Artificial Sequence
  Probe
cttttgtttatgagtgtgcatgcaagtgtgatgagtgtgaaagtgttcctgtagacatgt

SEQ ID NO: 98 - DNA, 60 bp, Artificial Sequence
  Probe
tctgaactcatctcttctaccttcaagaaggaaaaggccaaaagctgttccattatgtga

SEQ ID NO: 99 - DNA, 60 bp, Artificial Sequence
  Probe
acaccaaatgttacattagcacacactcatgcacctcagcatcacacaatcaatttcata

SEQ ID NO: 100 - DNA, 60 bp, Artificial Sequence
  Probe
caaatgtgcagctcaggatagggaagcataagaccctctgtttaaaagagagtcaagtag

SEQ ID NO: 101 - DNA, 60 bp, Artificial Sequence
  Probe
tcctctccactctttcagtaactgattcagacttgatgagtctttcccctttctctcatc

SEQ ID NO: 102 - DNA, 60 bp, Artificial Sequence
  Probe
caatatgctacaaagggcttcaccactcctagagaagaaactgtccaattttcctgagat

SEQ ID NO: 103 - DNA, 60 bp, Artificial Sequence
  Probe
attttgtttatttcaattgctgaactggctgagcttttactctccccaccttaggttgtt

SEQ ID NO: 104 - DNA, 60 bp, Artificial Sequence
  Probe
gcatctgtgtgaaatctcaggatatagtgtccactaaacttcagtgcactgcctaatgag

SEQ ID NO: 105 - DNA, 60 bp, Artificial Sequence
  Probe
gtatcaaacacactcctctggctcctagctctctctgttccactttgtttatccaatttc

SEQ ID NO: 106 - DNA, 60 bp, Artificial Sequence
  Probe
atttaacctgtgcaacaatcccacaaggtaagtacttctatgaccccctttacaaagaca

SEQ ID NO: 107 - DNA, 60 bp, Artificial Sequence
  Probe
ctttgaactaggccattagatttccgtgccacagtcatcgtcattatcgtcatctacatc

SEQ ID NO: 108 - DNA, 60 bp, Artificial Sequence
  Probe
gattctatattgcaggaccaccaacttggaatttcagctcagttcagcaaacacttttga

SEQ ID NO: 109 - DNA, 60 bp, Artificial Sequence
  Probe
tcaagtgtgtttattgaatggtgattgcctgctttatttcagaggaccagtgctttgatt

SEQ ID NO: 110 - DNA, 60 bp, Artificial Sequence
  Probe
atgacctagaaggaaactgtcgtgtgtcctatacattgccatcaactttgtttcctcatc

SEQ ID NO: 111 - DNA, 60 bp, Artificial Sequence
  Probe
ggcattgaacaaagctaaaaactccagtgatgccaaactagaaccaacaaatgtccaaac

SEQ ID NO: 112 - DNA, 60 bp, Artificial Sequence
  Probe
cacaatttgagaagcaaggaattaagctctcatttggctagagtgaccaggtatcctctt

SEQ ID NO: 113 - DNA, 60 bp, Artificial Sequence
  Probe
gagattcctattttgagggtcaaggttgaacttgtgttacacaggacatgggatatagcc

SEQ ID NO: 114 - DNA, 60 bp, Artificial Sequence
  Probe
cctgataacttcatagctgcctgtacagaaaagaaaatccccgttgtttttcgattgcaa

SEQ ID NO: 115 - DNA, 60 bp, Artificial Sequence
  Probe
tagaagaactggtagccacagtggtgaaattggaaagagaactttcttcctgaaaccttt

SEQ ID NO: 116 - DNA, 60 bp, Artificial Sequence
  Probe
ggcaggtgatgaatctgctgattaatttgttctgtttctgccaaacttctttaactccca

SEQ ID NO: 117 - DNA, 60 bp, Artificial Sequence
  Probe
atcctaggcaagcaatgacactactgtattaggattctccagagaagctaagccagtaag

SEQ ID NO: 118 - DNA, 60 bp, Artificial Sequence
  Probe
ttatcatcctttcccctttcccttcaactcttcgtacattcaatgcatggatcaatcagt

SEQ ID NO: 119 - DNA, 60 bp, Artificial Sequence
  Probe
ggtaactcctccttactcgatacttcatcagtactggtgacacaggaacctgaaattgaa

SEQ ID NO: 120 - DNA, 60 bp, Artificial Sequence
  Probe
ctgttagccaaagatccaggaatccttctttcaacacaagatcttaggcagctgaagtaa

SEQ ID NO: 121 - DNA, 60 bp, Artificial Sequence
  Probe
aactcctttgaactggacttacagttttccgaagatgagaagaggttgttgttggagaag

SEQ ID NO: 122 - DNA, 60 bp, Artificial Sequence
  Probe
tgcactgctacattgtgggatttatttctggatgatgtgcacatctaaggatatggatgt

SEQ ID NO: 123 - DNA, 60 bp, Artificial Sequence
  Probe
ataactggtttttcatcctggacatctgatctctgtgatccaaagcttctgaacctcaac

SEQ ID NO: 124 - DNA, 60 bp, Artificial Sequence
  Probe
aaaaatgttgcaggaaatgcaaagaaagaatgagcagatgatggaacagaaggagaggag

SEQ ID NO: 125 - DNA, 60 bp, Artificial Sequence
  Probe
ttttaacacccttatgaactagggactgttgcaccgagtttcacagttaaggaaacagag

SEQ ID NO: 126 - DNA, 60 bp, Artificial Sequence
  Probe
caggattcttgtgtggattcggtgaggtaatacttctaaagcacctagcaaagtgtcaag

SEQ ID NO: 127 - DNA, 60 bp, Artificial Sequence
  Probe
gaatgttgttctcccagaaaaatgcatagttcactcttacatccttcaggtgtcactcca

SEQ ID NO: 128 - DNA, 60 bp, Artificial Sequence
  Probe
gtattttcagagaggagagcttggtgtttttgtggtgccaagtggtaagataatgtctct

SEQ ID NO: 129 - DNA, 60 bp, Artificial Sequence
  Probe
ctgttttcttccatatttactgaagctcagaagcagtattgggtctgcaactcatccgat

SEQ ID NO: 130 - DNA, 60 bp, Artificial Sequence
  Probe
ttttccattctggagacgatgacagccttggacttcaatgacttcagagagtacttatct

SEQ ID NO: 131 - DNA, 60 bp, Artificial Sequence
  Probe
agcagaatcttggatttgtgacttgtagcttcataaggactcaacgaaagagattgcaca

SEQ ID NO: 132 - DNA, 60 bp, Artificial Sequence
  Probe
ttggacttagatcattcctgtgggcatcgatttttaggccgatctcttaaacagaaactg

SEQ ID NO: 133 - DNA, 60 bp, Artificial Sequence
  Probe
tggtcagttcaaggatgcccctcccaggctatgcttttctataacttttaaataaacctt

SEQ ID NO: 134 - DNA, 60 bp, Artificial Sequence
  Probe
ataatctacggacatctttgagcctcattttcctctttgcacaatggggatcatgatacc

SEQ ID NO: 135 - DNA, 60 bp, Artificial Sequence
  Probe
atgggtgtgaatatacttaatctggtcaaggaatgccagaatacccttcaaaacagccat

SEQ ID NO: 136 - DNA, 60 bp, Artificial Sequence
  Probe
ctgtgggaactttaacttttgggctttatttttcacagctctcgtggcattatccttcag

SEQ ID NO: 137 - DNA, 60 bp, Artificial Sequence
  Probe
gtgctcacattttatacccgctctgtcttagtgcgttgcaagagaggagtatatacagta

SEQ ID NO: 138 - DNA, 60 bp, Artificial Sequence
  Probe
catgcaccacatcctcactaacgtttgatgttttctgtctttttccattgtagccatctg

SEQ ID NO: 139 - DNA, 60 bp, Artificial Sequence
  Probe
ttctccttcctcttctagttcctggccattttctatccaagatgtggtacaacctcttac

SEQ ID NO: 140 - DNA, 60 bp, Artificial Sequence
  Probe
gtcattggaggtgggttgagttggttgatgggatttctctaaagatattgagaaactgct

SEQ ID NO: 141 - DNA, 60 bp, Artificial Sequence
  Probe
gatatctgcacggatgacttgatgggatccagaagcaactttgattccactctaataagc

SEQ ID NO: 142 - DNA, 60 bp, Artificial Sequence
  Probe
aggcttgaggtagagactgggacaagcatatccaactctgtatttattaccatcctttgt

SEQ ID NO: 143 - DNA, 60 bp, Artificial Sequence
  Probe
ttcctcacagggttgatatgaggatgaaacaagatgatagatcatggtggcatgtagtct

SEQ ID NO: 144 - DNA, 60 bp, Artificial Sequence
  Probe
cctagagaatcatctcaaagtcaaagctatgtccagaagcaggtcaggtttcagtatcct

SEQ ID NO: 145 - DNA, 60 bp, Artificial Sequence
  Probe
aagaattgaggctgcgtgttttgctacaattaaggacggaaagagcttgacaaaagattt

SEQ ID NO: 146 - DNA, 60 bp, Artificial Sequence
  Probe
ctttaaactgttgtgccagtgcttaggctttggaagtggtcatttcagatgtgattcatc

SEQ ID NO: 147 - DNA, 60 bp, Artificial Sequence
  Probe
tctctctcccaaaataaactactccctctttggtgaaacaactgaaatcaggaggacaga

SEQ ID NO: 148 - DNA, 60 bp, Artificial Sequence
  Probe
aatatttgggagagaaggatggggaagcattgcaaggaaattgtgctttatccaacaaaa

SEQ ID NO: 149 - DNA, 60 bp, Artificial Sequence
  Probe
aagctaccttaagaaaggctggttaccatcggagtttacaaagtgctttcacgttcttac

SEQ ID NO: 150 - DNA, 60 bp, Artificial Sequence
  Probe
atgggacatttttgctacataaccagagatgtgccagtccctttcctggtataaaaagag

SEQ ID NO: 151 - DNA, 60 bp, Artificial Sequence
  Probe
caagcaggattgttctgttctaaaaagctgttgcacagcattcgcaatgagatctttagt

SEQ ID NO: 152 - DNA, 60 bp, Artificial Sequence
  Probe
acacttcacaaactgagtgaatcccagctagaactgaactggaacaacagattcttgaac

SEQ ID NO: 153 - DNA, 60 bp, Artificial Sequence
  Probe
catgaacaaatctcttaacttctctgagcctcagtccctcacctgtgaaattgattcagc

SEQ ID NO: 154 - DNA, 60 bp, Artificial Sequence
  Probe
aaagacttaccactgaactcatcatgcatatccaaaaatcgctcccgttgttagaaggac

SEQ ID NO: 155 - DNA, 60 bp, Artificial Sequence
  Probe
tgaatctttttgccagcattacatcctgtggctttttgaatttgtggccttttgaatcac

SEQ ID NO: 156 - DNA, 60 bp, Artificial Sequence
  Probe
tgctactgttgtagagaagggtaggccagagaatttctttatgagcagctcttagaaagg

SEQ ID NO: 157 - DNA, 60 bp, Artificial Sequence
  Probe
aggaattcacacagctaatcaattccataaggtgcagttgctggcttctctcttcttaag

SEQ ID NO: 158 - DNA, 60 bp, Artificial Sequence
  Probe
cagggaagacaaaaattctagataagctccgtcacacacatgtacaagatggtgaagcag

SEQ ID NO: 159 - DNA, 60 bp, Artificial Sequence
  Probe
tatctgtcccctgctactagattgtgagctccttgagggaaaggaacatgatttatttgt

SEQ ID NO: 160 - DNA, 60 bp, Artificial Sequence
  Probe
ggtaaactggaatgacccacatcaatggaaactagtaaagcgaggatttatttggaccca

SEQ ID NO: 161 - DNA, 60 bp, Artificial Sequence
  Probe
catgagagatcagagggcagaaagatagagagtctgcacacttattacctttgctccttt

SEQ ID NO: 162 - DNA, 60 bp, Artificial Sequence
  Probe
tagaagaagagctggtaaaaaagatagaaccacagacgatccccaggttcctttcttgaa

SEQ ID NO: 163 - DNA, 60 bp, Artificial Sequence
  Probe
gcttaatgctatgtccagagatgatttgccagtgaagctagatttgccagtgaagagaat

SEQ ID NO: 164 - DNA, 60 bp, Artificial Sequence
  Probe
caaaaccagaatctgaactgagggagtctgtctttggagctcactcattagctactacat

SEQ ID NO: 165 - DNA, 60 bp, Artificial Sequence
  Probe
cctcttacttgttctgtctttctctctctcgctttaaaggtgtcgctgcattttggtaac

SEQ ID NO: 166 - DNA, 60 bp, Artificial Sequence
  Probe
ctctttccacttagcataacgttttcaaggttctttcacatgaatcagtgcctcagtcct

SEQ ID NO: 167 - DNA, 60 bp, Artificial Sequence
  Probe
gaaggcaagcacagataagttgatcgtggctcagttctttgaaggagattaataggcttt

SEQ ID NO: 168 - DNA, 60 bp, Artificial Sequence
  Probe
cacagatggtgttatttcctgtgttagacttcctacttactgatagctgggctcacactt

SEQ ID NO: 169 - DNA, 60 bp, Artificial Sequence
  Probe
cagatattcatgaggacctgttcagaagcaattcagcaactacgaacagaagctcacaag

SEQ ID NO: 170 - DNA, 60 bp, Artificial Sequence
  Probe
gggattctgcatctcatttcacagagtgacatcctcatgagaaccaaatctttggaagtt

SEQ ID NO: 171 - DNA, 60 bp, Artificial Sequence
  Probe
ctgagccactggattttctcaccctcagaactgtgagccaacaaatttctgttctttata

SEQ ID NO: 172 - DNA, 60 bp, Artificial Sequence
  Probe
gttgccaggagatttcacagactggcagttactcatttgtaatcaacaaccttttgcaaa

SEQ ID NO: 173 - DNA, 60 bp, Artificial Sequence
  Probe
ttaatcccacttttagggttgccgaggatttttcgaacgagcagaaatgtattggtaact

SEQ ID NO: 174 - DNA, 60 bp, Artificial Sequence
  Probe
atatttatggctttgttgagtttccttcctgtagggctgtctgtgttcctttcacaaact

SEQ ID NO: 175 - DNA, 60 bp, Artificial Sequence
  Probe
ttgacgtcatgaaattcaatggctcatcgccttagtctctaagaaagcttgttggctaaa

SEQ ID NO: 176 - DNA, 60 bp, Artificial Sequence
  Probe
ctgccaaatacaattttcgcagtagccctgtggcttagatactgttagctatcactgttc

SEQ ID NO: 177 - DNA, 60 bp, Artificial Sequence
  Probe
taatgattactgtcacgatgtgtgtggtacagtttgacaaacctgggtccatatagacca

SEQ ID NO: 178 - DNA, 60 bp, Artificial Sequence
  Probe
tgatttattccatatcccatcccattgtgtctctgacctcatctgccacattgttttgtc

SEQ ID NO: 179 - DNA, 60 bp, Artificial Sequence
  Probe
atgggcacttgatccaatcagctactcagttctggaaatttcattgggaatctcagaaaa

SEQ ID NO: 180 - DNA, 60 bp, Artificial Sequence
  Probe
tagtgggtgggagaattccttattgcaatcacactctacttctccatccagaaaactctc

SEQ ID NO: 181 - DNA, 60 bp, Artificial Sequence
  Probe
agaactcagttttgtgaccatgacagtaatgaaaccagggtcccaaccaagaaatctaac

SEQ ID NO: 182 - DNA, 60 bp, Artificial Sequence
  Probe
gaagataagtctccatttgccttttcgcagggttgctttttgtttttctttctacctgct

SEQ ID NO: 183 - DNA, 60 bp, Artificial Sequence
  Probe
tatactgatgcagaaagacgatcagtgatggatgcaacacagattgctggtcttaattgc

SEQ ID NO: 184 - DNA, 60 bp, Artificial Sequence
  Probe
tagccaacacaatagggaaatggagaaaatgtactctgaacaccatgaaaagggaacctg

SEQ ID NO: 185 - DNA, 60 bp, Artificial Sequence
  Probe
atgatgtttcaaagctggtctgccattctagatgagcctccttgcttatttaagttccag

SEQ ID NO: 186 - DNA, 60 bp, Artificial Sequence
  Probe
ctgttcccttacttttgggatgacttctggttcgtgttgaaggtggtgctcattataatt

SEQ ID NO: 187 - DNA, 60 bp, Artificial Sequence
  Probe
tttgttttgtttgcttggcatagccccttcaaggaatttaatctctcggccatattcttg

SEQ ID NO: 188 - DNA, 60 bp, Artificial Sequence
  Probe
ggatttttaaggggtaacctgagttctgtttcttttcccccttttctaggctgattccaa

SEQ ID NO: 189 - DNA, 60 bp, Artificial Sequence
  Probe
ctttctgacctactacctttcctcaaagctttcaatccttttgggctttctccacttgaa

SEQ ID NO: 190 - DNA, 60 bp, Artificial Sequence
  Probe
attctttcaagtctgaacaggcctcttagagtctctgctccttggaagtgtagaattgac

SEQ ID NO: 191 - DNA, 60 bp, Artificial Sequence
  Probe
ttttccagcatctagagctacattctatgaactcatcagctcatgacccattcctccttc

SEQ ID NO: 192 - DNA, 60 bp, Artificial Sequence
  Probe
tatgatgtagaagccttggacttggaaagcccgaaaaaccttgtcataaactgtgaagtc

SEQ ID NO: 193 - DNA, 60 bp, Artificial Sequence
  Probe
gctccagtatttatgttgccactctgttgaatgtacagcccataacttccctaaccaatt

SEQ ID NO: 194 - DNA, 60 bp, Artificial Sequence
  Probe
ctgttgcaagtcttaagtggggaatgaactttgtgtttttaagttggcaaagaccagtgt

SEQ ID NO: 195 - DNA, 60 bp, Artificial Sequence
  Probe
ttacatgcgccatctcatctagtcttcacaaccaccctcaaaagaaccattatttcatgg

SEQ ID NO: 196 - DNA, 60 bp, Artificial Sequence
  Probe
tttcccttagcactgctagattgccctccaaaaatgtctttttgtaactgaccctcttac

SEQ ID NO: 197 - DNA, 60 bp, Artificial Sequence
  Probe
gtataggccggtctaaagtgagctctatgggcagatctaccccttacttattattccaga

SEQ ID NO: 198 - DNA, 60 bp, Artificial Sequence
  Probe
tcagtgcatagagagaaggagatagtcaaagaaccactgtggggcagaaaaggaaaatat

SEQ ID NO: 199 - DNA, 60 bp, Artificial Sequence
  Probe
ccggaaaaagaaaggctagaaaatactcgcacttcctcagaaccctctttcttgttaacg

SEQ ID NO: 200 - DNA, 60 bp, Artificial Sequence
  Probe
atttatgatgctaaaacagatcccttctgccccatattccgtcttggcaaaatagtggag

SEQ ID NO: 201 - DNA, 60 bp, Artificial Sequence
  Probe
aggctcctaggtttagcttttaaaaacctgaaaggggaagcaaaaaccaaaatgtgtgac

SEQ ID NO: 202 - DNA, 60 bp, Artificial Sequence
  Probe
aaataatccagtcttcactgggttcccattctgagggtccactactcaaaaatttgcttc

SEQ ID NO: 203 - DNA, 60 bp, Artificial Sequence
  Probe
cctgtagttctagttacttggaggctgaggcagaagattcccttgatccagtaattcaag

SEQ ID NO: 204 - DNA, 60 bp, Artificial Sequence
  Probe
caatgtggtttcacaaacatcacttgtggatgacctacgaagcgattatcactggattct

SEQ ID NO: 205 - DNA, 60 bp, Artificial Sequence
  Probe
ggtgatctcatctagtctctggtttcaaacacagagtgatcactcctgtacttgctgttt

SEQ ID NO: 206 - DNA, 60 bp, Artificial Sequence
  Probe
ctaaagcttcgcataaatgatctttagggcagacgttaaagggctggtacaactacaacc

SEQ ID NO: 207 - DNA, 60 bp, Artificial Sequence
  Probe
tctagcttacttgtaccagtcacactagcctcctttgtttcttttccacaccagattctt

SEQ ID NO: 208 - DNA, 60 bp, Artificial Sequence
  Probe
cgacccttcacccttgacgatttacagtacatgatctttcatacacccttttgcaagatg

SEQ ID NO: 209 - DNA, 60 bp, Artificial Sequence
  Probe
aaccagggggaaggtgagggactgtggaatctaacttccttactttacagattaagaaac

SEQ ID NO: 210 - DNA, 60 bp, Artificial Sequence
  Probe
aatcgctcctctggaattgtaaccttgcagggcaaaagctatcatttcaagattttttgg

SEQ ID NO: 211 - DNA, 60 bp, Artificial Sequence
  Probe
ggattcatgttgcagatattggtgatagtgtgacatgaaggcaggattgtggttaagagg

SEQ ID NO: 212 - DNA, 60 bp, Artificial Sequence
  Probe
gaatgaaggctgcagatggaagtaaaatagattatgctggattatctgggtgtgcccaat

SEQ ID NO: 213 - DNA, 60 bp, Artificial Sequence
  Probe
atcacactgtgttgcaacatctgtacctgatgttgcaagactaacatttttgctacctct

SEQ ID NO: 214 - DNA, 60 bp, Artificial Sequence
  Probe
atgttgcagaatactcactatttccaaatagcccaaaatggacttccaaagtggtcacct

SEQ ID NO: 215 - DNA, 60 bp, Artificial Sequence
  Probe
aaagctttacggacagtgattctgtcctaaacaagacagtgactccaggatttctgaaga

SEQ ID NO: 216 - DNA, 60 bp, Artificial Sequence
  Probe
ctagaagcctacagccttggttattccagttcatctttttaacaaccctgctgaggaaac

SEQ ID NO: 217 - DNA, 60 bp, Artificial Sequence
  Probe
aaggaggatttgctggctggagtggagaatttggaaattcgagacatacaaaccattaat

SEQ ID NO: 218 - DNA, 60 bp, Artificial Sequence
  Probe
gataataatctgggatccatgggtgggcttcagagaatctgtgtaccccctaaaattgta

SEQ ID NO: 219 - DNA, 60 bp, Artificial Sequence
  Probe
atctgactttcacttcttgaaagtgatcggaaagggcagttttggaaaggttcttctagc

SEQ ID NO: 220 - DNA, 60 bp, Artificial Sequence
  Probe
ggtaaggacctccaagacctgaataagagtgtaaataatccgaaggttccagttctgctc

SEQ ID NO: 221 - DNA, 60 bp, Artificial Sequence
  Probe
cttcacaaacctacaggttctcggagctctggtggaagcttctcctataaaagtaatgag

SEQ ID NO: 222 - DNA, 60 bp, Artificial Sequence
  Probe
tgtgtgcacataaatgctccttatcttggtcccatgtccttcttgagttaccaattttgt

SEQ ID NO: 223 - DNA, 60 bp, Artificial Sequence
  Probe
ccatctaaagtcagttatggagctagatgaggggctgcctgaatattaaggaagaagtgg

SEQ ID NO: 224 - DNA, 60 bp, Artificial Sequence
  Probe
ggactttatgaagcacctggacaagaaaacccaaactccaaagctttgaacattcatgac

SEQ ID NO: 225 - DNA, 60 bp, Artificial Sequence
  Probe
caatgtcaatagcaggagttgctgctcaggagatcagagtcccattaaaaactggatttc

SEQ ID NO: 226 - DNA, 60 bp, Artificial Sequence
  Probe
ttgagtgctgagcaggtaaatccaagaagtgatttccacaaggtagaaaaagtggtgaag

SEQ ID NO: 227 - DNA, 60 bp, Artificial Sequence
  Probe
gtttatctccacagtgcagttttctcagtacccattcttagtttgcatgcagatggacaa

SEQ ID NO: 228 - DNA, 60 bp, Artificial Sequence
  Probe
cacactcttctttggcatgtaacttagcaactggatcgatcagtcaaaggggaaaatgaa

SEQ ID NO: 229 - DNA, 60 bp, Artificial Sequence
  Probe
cacctgctcatcacataagtcagaagggacagatgtggtcttaactcctgaaatatccag

SEQ ID NO: 230 - DNA, 60 bp, Artificial Sequence
  Probe
cctcttttatctctgcgtgtaaacccctattttgttttcaaggtccctgtcagatgcttc

SEQ ID NO: 231 - DNA, 60 bp, Artificial Sequence
  Probe
acaagccaaaaacacctatggaacaggttgcttcttactgtgtaatacgggtcgtaaatg

SEQ ID NO: 232 - DNA, 60 bp, Artificial Sequence
  Probe
ccagaaaacctactgaagacctgaggaatggaggactagattgaagaattgggaagtcac

SEQ ID NO: 233 - DNA, 60 bp, Artificial Sequence
  Probe
gtttcattcatcctgaccactgtatccgtgtaatgtgatctgagctacaacaggtggtat

SEQ ID NO: 234 - DNA, 60 bp, Artificial Sequence
  Probe
atgtttcttcatgctctgaggactgggttggctaccagaggaaatgctactttatttcta

SEQ ID NO: 235 - DNA, 60 bp, Artificial Sequence
  Probe
tttaaagattttcctccctcctgtttcaggtgggtcacattctgatgaatgtttcccttg

SEQ ID NO: 236 - DNA, 60 bp, Artificial Sequence
  Probe
gtctgagtttttaaatagctaatacgaccgggtacagtggttcatgcctgtaatcccaga

SEQ ID NO: 237 - DNA, 60 bp, Artificial Sequence
  Probe
tatgcttttggggcctgggaatttgaggtattgggaccaagtcatttctttagatctttt

SEQ ID NO: 238 - DNA, 60 bp, Artificial Sequence
  Probe
ggttaaattaactgtagtcctgatgggactgtctccatgtcttttcccttcccttaacgt

SEQ ID NO: 239 - DNA, 60 bp, Artificial Sequence
  Probe
gaaattcccatgtattctcccaagtatctattcaccaaggccacagctctaaccaaatgc

SEQ ID NO: 240 - DNA, 60 bp, Artificial Sequence
  Probe
tcagaagaatccaagcaggtattggcttagttgtaagggctttaggatcaggctgaatat

SEQ ID NO: 241 - DNA, 60 bp, Artificial Sequence
  Probe
cccgtgaccaatctgttctgtctcagatcctgattaaagtcatgggttctgaaaactact

SEQ ID NO: 242 - DNA, 60 bp, Artificial Sequence
  Probe
aagagttaacagtagtgccctgaggttagtttcggagcacaattattgttggagctgata

SEQ ID NO: 243 - DNA, 60 bp, Artificial Sequence
  Probe
gcctgaaaaccagcacagtatcatttccactgtattccactcatcaaagcagttacagag

SEQ ID NO: 244 - DNA, 60 bp, Artificial Sequence
  Probe
ggaagcaaacttctagtacccctcctttcctaagcctagaagcttatgatgagaaatggg

SEQ ID NO: 245 - DNA, 60 bp, Artificial Sequence
  Probe
gaaacttcagttgtagctgagagcaggcctggaatccccatgcttatactttttatttcc

SEQ ID NO: 246 - DNA, 60 bp, Artificial Sequence
  Probe
taagcacttacgtgagtaaataatgcagctcagatgctgagctctagtaggaaatgctgg

SEQ ID NO: 247 - DNA, 60 bp, Artificial Sequence
  Probe
tcagagatacaggaacaccagtgagtgtgtttgcttcaatcatctggattgtaaactcct

SEQ ID NO: 248 - DNA, 60 bp, Artificial Sequence
  Probe
ctatgaaatcagaggatatgtcatcatcaaacccttggtgtgggtctgaggtcttgactc

SEQ ID NO: 249 - DNA, 60 bp, Artificial Sequence
  Probe
agtgtgtgaatatcaggaagatgactgaacgtctttgggactccgtttcctcattgtaaa

SEQ ID NO: 250 - DNA, 60 bp, Artificial Sequence
  Probe
ttctttgggatagagaatgttccagacattctcgcttccctgaaagactgaagaaagtgt

SEQ ID NO: 251 - DNA, 60 bp, Artificial Sequence
  Probe
attgtgaaaatcaaacacttgtcagcccctcaagagcctttagatttcctacttccacac

SEQ ID NO: 252 - DNA, 60 bp, Artificial Sequence
  Probe
ttttccttataaggacactaatcccatgatgggggccctacccacataacctcatttaaa

SEQ ID NO: 253 - DNA, 60 bp, Artificial Sequence
  Probe
gggtaaaaagccttaagttcccttagcttcagattcctgggctgtaacatgttgatgatg

SEQ ID NO: 254 - DNA, 60 bp, Artificial Sequence
  Probe
gttaatggggaatggattaccatgaggaaaaatatggggcattcagaaatgctctcaggt

SEQ ID NO: 255 - DNA, 60 bp, Artificial Sequence
  Probe
gctgactttgaagccataaatcgctgtaacaggccattgcctaaaaactttaactttgct

SEQ ID NO: 256 - DNA, 60 bp, Artificial Sequence
  Probe
aacagtgctcatggaactcttccaggattcaggcaatactgatattgagggcatagatac

SEQ ID NO: 257 - DNA, 60 bp, Artificial Sequence
  Probe
agaaagcagacaaagaaaaaagagctagcccaaaatcccaaactcaaaccaaaccaaaca

SEQ ID NO: 258 - DNA, 60 bp, Artificial Sequence
  Probe
aatcatccaacttctatgggcctcagtttcaacacccataaaataggcacaacaatctcc

SEQ ID NO: 259 - DNA, 60 bp, Artificial Sequence
  Probe
ataaaaagctgagatctggggacaatgtgagaatccttagcagtatgttgctgttgttgc

SEQ ID NO: 260 - DNA, 60 bp, Artificial Sequence
  Probe
attacaacatcctgctctattccttggtgccacttatgttaattgcggggattgtcattt

SEQ ID NO: 261 - DNA, 60 bp, Artificial Sequence
  Probe
cctgcccctagatacagcagtttatacccacacacctgtctacagtgtcattcaataaag

SEQ ID NO: 262 - DNA, 60 bp, Artificial Sequence
  Probe
tttgtgttgcacgcatgcttgaggaactcagatgatgaagtaagatttctacaaacgtgt

SEQ ID NO: 263 - DNA, 60 bp, Artificial Sequence
  Probe
cagctttgtgtcaattaccctggaggttacacttgctattgtgatgggaagaaaggattc

SEQ ID NO: 264 - DNA, 60 bp, Artificial Sequence
  Probe
gctaatctttcctccaggaaagggttgtgatttctccacttttcacttcatgaacaacca

SEQ ID NO: 265 - DNA, 60 bp, Artificial Sequence
  Probe
gttgaagttgaggtgagagatctgacagaagagctgcctcttgctagatagtatttgtgc

SEQ ID NO: 266 - DNA, 60 bp, Artificial Sequence
  Probe
ccccattttggtgttgatatggaaattcctaggtcactatgcagacaagaaaaccaggac

SEQ ID NO: 267 - DNA, 60 bp, Artificial Sequence
  Probe
ttttggacaccttagctatgttagttaccagggcagaggggactttgaattatctactgc

SEQ ID NO: 268 - DNA, 60 bp, Artificial Sequence
  Probe
ctttggacagaactagccaaaatgatgcctatttgaatagcccgagccttaactttgtga

SEQ ID NO: 269 - DNA, 60 bp, Artificial Sequence
  Probe
gaactaagggctttatccaaagtgttaccattcttcgagcgcccagattttcaactcttt

SEQ ID NO: 270 - DNA, 60 bp, Artificial Sequence
  Probe
tctcatgtcttttcgttaatgtgctctgtaccactggtgagtgctccatagtttccttac

SEQ ID NO: 271 - DNA, 60 bp, Artificial Sequence
  Probe
aagtcagagctgggatgaggtgaaagtgttataggaagaagaaatagcatgtgcataggg

SEQ ID NO: 272 - DNA, 60 bp, Artificial Sequence
  Probe
ggttgctgtttactttcctcttccaggaactgaagctgtttcccattggatttctttact

SEQ ID NO: 273 - DNA, 60 bp, Artificial Sequence
  Probe
ctgaggacattatcaaaaggagagcaagaaagagaagagagaaatgggcttgaggtgagt

SEQ ID NO: 274 - DNA, 60 bp, Artificial Sequence
  Probe
gaactcaagtttggttgccagaaaaatgtgcttcattcccccctggttaatttttacaca

SEQ ID NO: 275 - DNA, 60 bp, Artificial Sequence
  Probe
cccttctcttgcattcctcaaacatgctgagtttattccagccttaagcctttgatctac

SEQ ID NO: 276 - DNA, 60 bp, Artificial Sequence
  Probe
caggcatgtatgaatgaaagagtgactcaagattcctgtcatggaatttctgtgccagtg

SEQ ID NO: 277 - DNA, 60 bp, Artificial Sequence
  Probe
tttccatgagctacaacttgcttggattcctacaaagaagcagcaattttcagtgtcaga

SEQ ID NO: 278 - DNA, 60 bp, Artificial Sequence
  Probe
cttcaggacaaagaaggagcctagagacagaaatgacagatctctgctttggaaatcaca

SEQ ID NO: 279 - DNA, 60 bp, Artificial Sequence
  Probe
gccttagagacaaaaagagctcaaactcaaacagtccaagcatagcacagatccaatagc

SEQ ID NO: 280 - DNA, 60 bp, Artificial Sequence
  Probe
ccccgtttcatttttacaccaatttggtaaaaatgctgctctcagcctcccacaattaaa

SEQ ID NO: 281 - DNA, 60 bp, Artificial Sequence
  Probe
gccacgtttcatctttcctggatcactacagtgaagtattacagttgtacagttcccagt

SEQ ID NO: 282 - DNA, 60 bp, Artificial Sequence
  Probe
taaccaaaactgcatgatactggtacaaaagcatggtgctggtacaaaagcagacacata

SEQ ID NO: 283 - DNA, 60 bp, Artificial Sequence
  Probe
gggaccaatgattacctcatagggctgttgtgaggattaggatgaaatacctgtgaaagt

SEQ ID NO: 284 - DNA, 60 bp, Artificial Sequence
  Probe
taaatggagttggacaatgtggacagaatccactacccaggttgggaattaatctgatga

SEQ ID NO: 285 - DNA, 60 bp, Artificial Sequence
  Probe
tgtctgatggaaatagatgttatttgtgtagtctcatgggtggcctggcactgagtaatt

SEQ ID NO: 286 - DNA, 60 bp, Artificial Sequence
  Probe
aaaagagcctcagatgaggttacagttctcttgagaccaaggtgtcttgcatgtatcatc

SEQ ID NO: 287 - DNA, 60 bp, Artificial Sequence
  Probe
atctgtatcatcagtgcctctttgaaggtgggaaacattagtgaaaattctgttggtgcc

SEQ ID NO: 288 - DNA, 60 bp, Artificial Sequence
  Probe
ctggatacagtgtgcagtgcattcttcctgaattttgcaattctggtatctgggtgtatt

SEQ ID NO: 289 - DNA, 60 bp, Artificial Sequence
  Probe
cagaactggatacggtgtttacaattccaatctctctatttctgggtgaagggtcttggt

SEQ ID NO: 290 - DNA, 60 bp, Artificial Sequence
  Probe
agttcattctcactcttctctcttggttgagtcttgcctttcttcactctgttccctttc

SEQ ID NO: 291 - DNA, 60 bp, Artificial Sequence
  Probe
ctcagtaacttggttttgcattgactttccattcttccttggtcactcttctcattcggg

SEQ ID NO: 292 - DNA, 60 bp, Artificial Sequence
  Probe
ctgcaggccaaaatgcctatgaagaaggtaactctcttcctgacctaacttctgtaagag

SEQ ID NO: 293 - DNA, 60 bp, Artificial Sequence
  Probe
aagggatggccaaatacctgcagagatcatcacatttttacctgtcttactgtagtcgtt

SEQ ID NO: 294 - DNA, 60 bp, Artificial Sequence
  Probe
tgagatctctaagccactctcagatccacactttacagctttccaaaaagtgttcctgac

SEQ ID NO: 295 - DNA, 60 bp, Artificial Sequence
  Probe
tcaagcttcagcctactaaatctctgtttttatgttttgttttccaggccctatgcctgg

SEQ ID NO: 296 - DNA, 60 bp, Artificial Sequence
  Probe
actcagaaaaatagcttgtgggagcccagtgtttggactctataagtaaccttggacttt

SEQ ID NO: 297 - DNA, 60 bp, Artificial Sequence
  Probe
gttttctgcactcatgtcgctatgtatgtgcccttggactgtaatgcttttgacagttta

SEQ ID NO: 298 - DNA, 60 bp, Artificial Sequence
  Probe
cgtgaggaagttgcaagccaacaaaaaagttcaaggatctagaagacgattaagggaagg

SEQ ID NO: 299 - DNA, 60 bp, Artificial Sequence
  Probe
ggctcttgtttcttgtttgacttatgctcactctcatgttgatttctgactccagccaag

SEQ ID NO: 300 - DNA, 60 bp, Artificial Sequence
  Probe
tagatgggttgctcattagtgcatatcactgtgagttgaccaggggtaatagcatttgag

SEQ ID NO: 301 - DNA, 60 bp, Artificial Sequence
  Probe
acagtctactcacttggttgtttttttctggtggccagcccctatcctgaagttatatag

SEQ ID NO: 302 - DNA, 60 bp, Artificial Sequence
  Probe
attgaaaacaagagaccagcaagggtccttgtgaattatgatggtttggcgtgagaatag

SEQ ID NO: 303 - DNA, 60 bp, Artificial Sequence
  Probe
gggagatctcaagtatcccaaaggagccactgatgttccaaattatccttggtaaagtca

SEQ ID NO: 304 - DNA, 60 bp, Artificial Sequence
  Probe
aacttcctggattatcctcgccaaggactttgcaatatatttttccgccttttctggaag

SEQ ID NO: 305 - DNA, 60 bp, Artificial Sequence
  Probe
catttctcagttaaactttgtcaaactgtgaacacatggactttcaggagaggagcccac

SEQ ID NO: 306 - DNA, 60 bp, Artificial Sequence
  Probe
cttccacaacatctgtgcccatctactctgctttcttctgttactctggctaaactatcc

SEQ ID NO: 307 - DNA, 60 bp, Artificial Sequence
  Probe
aaaagctagctagtaaaaaggacgacccagcaacatgctttaaccccattgtatgtttgt

SEQ ID NO: 308 - DNA, 60 bp, Artificial Sequence
  Probe
aagcattgctttatggcttcttgcctttattagtgctgacagatacatggccattgtaca

SEQ ID NO: 309 - DNA, 60 bp, Artificial Sequence
  Probe
cttctgtgtatatagttagttttataaccctgaatgcccccacccttcccctaagcacac

SEQ ID NO: 310 - DNA, 60 bp, Artificial Sequence
  Probe
accagttttgaagatgctgacacagaagagacagtaacttgtctccagatgacggtttac

SEQ ID NO: 311 - DNA, 60 bp, Artificial Sequence
  Probe
gtagatgcttaaacctcagcttccctatctggaaaatgggctagtagtcctcacctagat

SEQ ID NO: 312 - DNA, 60 bp, Artificial Sequence
  Probe
gaggctgatgaagtgaattgggagacaaaggtgcttaattctttagccatcctgttgatg

SEQ ID NO: 313 - DNA, 60 bp, Artificial Sequence
  Probe
ctgtcaaggtactgtaacagtggtaatgtttttctgtgtgtctcagctcgttagaggcat

SEQ ID NO: 314 - DNA, 60 bp, Artificial Sequence
  Probe
tgcagagtgggttgatacaatttgactgaaagccccaaacctctaatcacattgtcaatc

SEQ ID NO: 315 - DNA, 60 bp, Artificial Sequence
  Probe
gtgataaaccacatgctaaagaacaacgtggctggacaaacatctatccagaccctagta

SEQ ID NO: 316 - DNA, 60 bp, Artificial Sequence
  Probe
caatgactttgttttaaggggaaactcttgaaggaatggggcctacttgttgctataccc

SEQ ID NO: 317 - DNA, 60 bp, Artificial Sequence
  Probe
gaagtgctcatgtgtggagagagtgtagacagagaaaaggacttaagcaggattttgagg

SEQ ID NO: 318 - DNA, 60 bp, Artificial Sequence
  Probe
ccatacagcttgtttctgttgtttggtgcattaggccaaaagacctaggcctaatagatg

SEQ ID NO: 319 - DNA, 60 bp, Artificial Sequence
  Probe
gaaaagtaagggactggaagggactgtgctcttccattctcaaattctaatctgtgtcca

SEQ ID NO: 320 - DNA, 60 bp, Artificial Sequence
  Probe
caggggatggaggtaaaaaaaaaaaaaaagcagagttgggtagtggagacccatccttag

SEQ ID NO: 321 - DNA, 60 bp, Artificial Sequence
  Probe
cattcagagttgtctcaccccttctcgtgccttttctctccttgagctttataaacagat

SEQ ID NO: 322 - DNA, 60 bp, Artificial Sequence
  Probe
gttctttcctaattcttcccaagctgtgagtcagaaagtcctggaaggagttgtaggaag

SEQ ID NO: 323 - DNA, 60 bp, Artificial Sequence
  Probe
cttcgaaattaaatgcggttagcatcatatagttcattttccccctccatgctgctgtgt

SEQ ID NO: 324 - DNA, 60 bp, Artificial Sequence
  Probe
tccttttcacttagtggaagagcagttgcagacatgaaaggttttcaagaagcctttctg

SEQ ID NO: 325 - DNA, 60 bp, Artificial Sequence
  Probe
ctggcaaccctgaaataaactcccatttcagtgcacatgtttgcaacaaacttaaggaaa

SEQ ID NO: 326 - DNA, 60 bp, Artificial Sequence
  Probe
cttgtagttgtgagtatgatcagggtgtactatagggtgagaggagtcctaagcaagtgc

SEQ ID NO: 327 - DNA, 60 bp, Artificial Sequence
  Probe
cgcagatttgccttcctggatctaaatgcactgtggagtcaaagattaaggtgtttcttt

SEQ ID NO: 328 - DNA, 60 bp, Artificial Sequence
  Probe
aatctctaacttccaaggtcccaccaacagttcagaaacctaccacagtaaatgttccaa

SEQ ID NO: 329 - DNA, 60 bp, Artificial Sequence
  Probe
aagctgaagaggaagcaagaaaacgtttagaagaagagaagcgtgcttttgaagaagcaa

SEQ ID NO: 330 - DNA, 60 bp, Artificial Sequence
  Probe
ttccaaattctaggagaccctagagatgatccagtataacccctggtgtcacagaaacag

SEQ ID NO: 331 - DNA, 60 bp, Artificial Sequence
  Probe
cgggatacttcttttatctgcagatggcctaatacttagttgtccaagtcgcgatcaagg

SEQ ID NO: 332 - DNA, 60 bp, Artificial Sequence
  Probe
acccacttcacatgtgccacagatactaagaatgtgcagtttgtttttgatgctgtaaca

SEQ ID NO: 333 - DNA, 60 bp, Artificial Sequence
  Probe
atctgcaatgaagctggatttaggaggcttactccaactgaagttaaggattacttggct

SEQ ID NO: 334 - DNA, 60 bp, Artificial Sequence
  Probe
gagggatatagtattcacaagtctccacaaactccaacacaaacctcaccaacacatcca

SEQ ID NO: 335 - DNA, 60 bp, Artificial Sequence
  Probe
gaaacttgcaaggctgaagaaagagaggcagttagtcataggagacagttcagtcagatg

SEQ ID NO: 336 - DNA, 60 bp, Artificial Sequence
  Probe
cttatatcactgggaaactagaagcagtttcccagctcccatattctcttgcatccatcc

SEQ ID NO: 337 - DNA, 60 bp, Artificial Sequence
  Probe
cggttggatcaggatgagagtttttcccagaggcttccacttaatattgaagaggctaaa

SEQ ID NO: 338 - DNA, 60 bp, Artificial Sequence
  Probe
tgaaatttacagttactgcctaggagttaatgatcgttctgggtcagcttgaatgtcccc

SEQ ID NO: 339 - DNA, 60 bp, Artificial Sequence
  Probe
agacacagcctggaccactccagacaagacaataaataaacaagcaaacatggttctttg

SEQ ID NO: 340 - DNA, 60 bp, Artificial Sequence
  Probe
atcttttcagaattggtctcctggagggggcataattgggtaatttttctgccaaatgag

SEQ ID NO: 341 - DNA, 60 bp, Artificial Sequence
  Probe
acttctgtttgtcttacgcttctctcagggaaaaacatgcagtcctctagtgtttcatgt

SEQ ID NO: 342 - DNA, 60 bp, Artificial Sequence
  Probe
gctttttaaagaactgatgtagaatgagggaggggaaagtttaaaatcccagctgggctg

SEQ ID NO: 343 - DNA, 60 bp, Artificial Sequence
  Probe
agacatgtacagcttactttggtgcttttagcactgagagtctgctgtgatgggaataaa

SEQ ID NO: 344 - DNA, 60 bp, Artificial Sequence
  Probe
gtatacttccttcatgaagtctcatcgctgctatgacctgattcccacaagctccaaatt

SEQ ID NO: 345 - DNA, 60 bp, Artificial Sequence
  Probe
aaagccagaaattccagagcataaacatctcgtgactgtcctttcatctgtggtaggaat

SEQ ID NO: 346 - DNA, 60 bp, Artificial Sequence
  Probe
gatttttcctccttcagagattcctgggaagccagaaattgtagattctgcctctgaact

SEQ ID NO: 347 - DNA, 60 bp, Artificial Sequence
  Probe
ggtaagataaccaagtgggagcctctagaatggctcatgggaagtgtgacatgaatattg

SEQ ID NO: 348 - DNA, 60 bp, Artificial Sequence
  Probe
gtgcacagagctcgaaaactagctcaacaatactatcttgtgtaccaagaacccattcct

SEQ ID NO: 349 - DNA, 60 bp, Artificial Sequence
  Probe
actccacctcactatcatgggttcccagtgagactttttgatacatcatcttgcaaagac

SEQ ID NO: 350 - DNA, 60 bp, Artificial Sequence
  Probe
gggacttaatagacacatgtgcaagaggctaaaggtgaagccaaaagtggacagagatat

SEQ ID NO: 351 - DNA, 60 bp, Artificial Sequence
  Probe
tccacctccttacatactgacctgtatttcagagagcctcttattgccattcagagatcc

SEQ ID NO: 352 - DNA, 60 bp, Artificial Sequence
  Probe
ttgggatttaatgccctcaaatcgaggaacacaatgcactaaaagtcctacacagcaaag

SEQ ID NO: 353 - DNA, 60 bp, Artificial Sequence
  Probe
atattccaaggatccttgagttcatgacaacaaaatctccctgttagcctctgcctcttc

SEQ ID NO: 354 - DNA, 60 bp, Artificial Sequence
  Probe
ctgaaaagtggaaatgaacatagtgcctgtcttagggaggtaattagggcttagcatggt

SEQ ID NO: 355 - DNA, 60 bp, Artificial Sequence
  Probe
ttcctccagagtcccttattcatgagttttcacagtaatccttttcacatgcacctcagg

SEQ ID NO: 356 - DNA, 60 bp, Artificial Sequence
  Probe
cactttaggtaggctgggaacgtgattattgatccagattcacatgggttacaggtttga

SEQ ID NO: 357 - DNA, 60 bp, Artificial Sequence
  Probe
cagtgacaaacatatcctttcaagacagaaagagacaggagacatgagtctttgccggag

SEQ ID NO: 358 - DNA, 60 bp, Artificial Sequence
  Probe
gacacaaatacgaaagtgttggggttattggaggttctttgtgtagaatctctggggagt

SEQ ID NO: 359 - DNA, 60 bp, Artificial Sequence
  Probe
gggccttctctatccttgtctctgttgtttatatcctgctgaagtgtgattccacttgtg

SEQ ID NO: 360 - DNA, 60 bp, Artificial Sequence
  Probe
gatatgctgtggaaatactccaacccctgtggagagttttgaatttaggctgagaactga

SEQ ID NO: 361 - DNA, 60 bp, Artificial Sequence
  Probe
catatcattctggaggtgcacttactcttctacaatgtggccggatcatttgtcattcct

SEQ ID NO: 362 - DNA, 60 bp, Artificial Sequence
  Probe
ctctgcttccaaaccctttgctgtttgcattctgcccctttcttattctctttataccaa

SEQ ID NO: 363 - DNA, 60 bp, Artificial Sequence
  Probe
tcatttgtgtggaaagtcagaggaaaaatgatccagtggacacttggggattatctgtca

SEQ ID NO: 364 - DNA, 60 bp, Artificial Sequence
  Probe
gcccaaaacataaatgggtggtatggacgccgtatcaccttactaaactgtgacattttg

SEQ ID NO: 365 - DNA, 60 bp, Artificial Sequence
  Probe
caaatgttctccagtcattatgttaatatttctgaggagcctgcaacatgccagccactg

SEQ ID NO: 366 - DNA, 60 bp, Artificial Sequence
  Probe
tgcttcagttaattcaggtgttgaaggagcttaggttttagaggcacgtagacttggttc

SEQ ID NO: 367 - DNA, 60 bp, Artificial Sequence
  Probe
tcatgcttatgagaacaaaggtaccaagcaatctgctatggcaatctgtcagcacttcta

SEQ ID NO: 368 - DNA, 60 bp, Artificial Sequence
  Probe
ccttccctgctttgtagaaatcttcttcattctgctcaggctctgatttcttaggtcagg

SEQ ID NO: 369 - DNA, 60 bp, Artificial Sequence
  Probe
agcaattgtaacggttaactgtaacgttttctttcacacacacacacacacacacacaca

SEQ ID NO: 370 - DNA, 60 bp, Artificial Sequence
  Probe
tgtgctcatgcctacttgcagtgaaattttggaaagtccttgattctttccttgtgttca

SEQ ID NO: 371 - DNA, 60 bp, Artificial Sequence
  Probe
gtggaagtgacttgcttatgagctgttgacaaatgaaacattgggaaaccttgagtctcc

SEQ ID NO: 372 - DNA, 60 bp, Artificial Sequence
  Probe
atgttatttttaagctccctttcttgccaatccctcacggatctttctccgatagatgca

SEQ ID NO: 373 - DNA, 60 bp, Artificial Sequence
  Probe
agatattggcacctgtgaaatgagatttaacctgtcgctgctgcttagtgtcactaactc

SEQ ID NO: 374 - DNA, 60 bp, Artificial Sequence
  Probe
tgtctttcaatcctctgcttatatcaggcttaccaatgtctgttggctcaaagcaagcta

SEQ ID NO: 375 - DNA, 60 bp, Artificial Sequence
  Probe
cttcataaccaggcttccttctgtgggtttggcagtggtttttggaagaatctaaaactt

SEQ ID NO: 376 - DNA, 60 bp, Artificial Sequence
  Probe
atgagttaggctttgcacttgtaaggaaggagaagcgtgcacaacctcaaatagctaata

SEQ ID NO: 377 - DNA, 60 bp, Artificial Sequence
  Probe
aggatagagacatatgggagtccagtagacatcaatcaaactggactcagtttgcacaca

SEQ ID NO: 378 - DNA, 60 bp, Artificial Sequence
  Probe
ttcccttttctgagtcattctctcttggcctcctacattctgaagaggtcatttgcattg

SEQ ID NO: 379 - DNA, 60 bp, Artificial Sequence
  Probe
cagtgtgcctacatcaatgattccattggcttacatcgagtagagaacatcagccatacg

SEQ ID NO: 380 - DNA, 60 bp, Artificial Sequence
  Probe
tcaataagtagggcaggcattctctatgcctgctagggaagtgtgacttgttatactctt

SEQ ID NO: 381 - DNA, 60 bp, Artificial Sequence
  Probe
gttcttacggctcaaaaggaccagacttggcttggatgactttgagtctctgaaagttat

SEQ ID NO: 382 - DNA, 60 bp, Artificial Sequence
  Probe
aaaatgggtgcattacccatcgttgtggtttggtaatgagctgagaacaaagaagaaaca

SEQ ID NO: 383 - DNA, 60 bp, Artificial Sequence
  Probe
ggaagggtagggtggaaagggttaagcatgctgttactgaacaacataattagaagggaa

SEQ ID NO: 384 - DNA, 60 bp, Artificial Sequence
  Probe
ccatacagtgggagtatttttccttttggtggcgggaatggagtgagatggttataaaga

SEQ ID NO: 385 - DNA, 60 bp, Artificial Sequence
  Probe
gtacctctcagctctgaaccccagtgacttactcaggtcagtatctaatataagctcgga

SEQ ID NO: 386 - DNA, 60 bp, Artificial Sequence
  Probe
tcatcactaggagcgacaagtgcctcatttaatttcggcaagaaagttgatagctctgtt

SEQ ID NO: 387 - DNA, 60 bp, Artificial Sequence
  Probe
atgcgggttctagtttttccacatccttgacaacagtggcagttatctgcttttttgatt

SEQ ID NO: 388 - DNA, 60 bp, Artificial Sequence
  Probe
ctattgggtacacaaattggtgaagcaggtgtagcctatggttgcatcatatggcaaaag

SEQ ID NO: 389 - DNA, 60 bp, Artificial Sequence
  Probe
aattagttgaaaactaacaccgtgagttcttcagtgaggggtgcagagctcattttagct

SEQ ID NO: 390 - DNA, 60 bp, Artificial Sequence
  Probe
gtcttatctgaactacacttactgaacagcttgaaggccttttgagttctgctggacagg

SEQ ID NO: 391 - DNA, 60 bp, Artificial Sequence
  Probe
caagtgacagatagtaagaaaagcttcttgagcaggtggaggtcactgaatcccctacta

SEQ ID NO: 392 - DNA, 60 bp, Artificial Sequence
  Probe
cagttaagtttgggaaagtgtctcaagtactcactagatgttgtgaacggcctgctcttc

SEQ ID NO: 393 - DNA, 60 bp, Artificial Sequence
  Probe
aagcaagcctcctcattgtctagagggagattttatctcatccttcaaggttgcttgttg

SEQ ID NO: 394 - DNA, 60 bp, Artificial Sequence
  Probe
gagcatttggaaggggatagggaagcacataaagatgatatgctcagctttactgtcgtt

SEQ ID NO: 395 - DNA, 60 bp, Artificial Sequence
  Probe
ccttttctcttccccgtcttctctcagccacatctctcttatcctatcttggtgaagaag

SEQ ID NO: 396 - DNA, 60 bp, Artificial Sequence
  Probe
gccaatgcaaagagagaaactggatgaaccatatcacattctcagcctgtctctaaggag

SEQ ID NO: 397 - DNA, 60 bp, Artificial Sequence
  Probe
gagctgttaaggtactacacatctgcctctggtgatgagatggtttctctcaaggactac

SEQ ID NO: 398 - DNA, 60 bp, Artificial Sequence
  Probe
agcagtttaagtccagtttcaaaccaagcaaaaagccaggaaacataggagaaagggaag

SEQ ID NO: 399 - DNA, 60 bp, Artificial Sequence
  Probe
gacctgtcctgtgaaatcacactctgtcatttccacaatatcctcttggtcacactgttt

SEQ ID NO: 400 - DNA, 60 bp, Artificial Sequence
  Probe
ctcattcagagtttcgaatgcaccaaaagggtgtttccaaaacatgatatgggaaggagg

SEQ ID NO: 401 - DNA, 60 bp, Artificial Sequence
  Probe
ttgcagttgacaaactgaaattatcaggatctctgagaaagggactaagctggggattgg

SEQ ID NO: 402 - DNA, 60 bp, Artificial Sequence
  Probe
ggaagttctggtgtcatagatatcccgttttgtgaggtagagctgtgcattaaacttgca

SEQ ID NO: 403 - DNA, 60 bp, Artificial Sequence
  Probe
aaaaaaattcacagcctgggcaacagacagagttttgcagttacccatgaaaaaaatccc

SEQ ID NO: 404 - DNA, 60 bp, Artificial Sequence
  Probe
acagaagatgagggaatctttggaaatttaggcgacagaggccagacataccaataaacg

SEQ ID NO: 405 - DNA, 60 bp, Artificial Sequence
  Probe
ttctcgtgactctcctttgtatctagaacacagtgtctttccccaaaacctgggtcatat

SEQ ID NO: 406 - DNA, 60 bp, Artificial Sequence
  Probe
ctttaagaaaatgcaaagaagtgaaagtggagaaacccacagcagatgcagaggcctatg

SEQ ID NO: 407 - DNA, 60 bp, Artificial Sequence
  Probe
gacttgctatacattggcaaggatcgcaaaaacccaagggaggattatctggatgtctat

SEQ ID NO: 408 - DNA, 60 bp, Artificial Sequence
  Probe
gggcataaacctgacctggtctatattccctagagttccagtctcttttgcttaggacat

SEQ ID NO: 409 - DNA, 60 bp, Artificial Sequence
  Probe
ccttgctaagggaacatctcgatgtttgaacctttgttgtgttttgtacagggcattctc

SEQ ID NO: 410 - DNA, 60 bp, Artificial Sequence
  Probe
tttttcgtttttttttagacagagtcttgctctgtctagagcaaggcaggagggcagtaa

SEQ ID NO: 411 - DNA, 60 bp, Artificial Sequence
  Probe
gtattctctgccctcataggacactctagtagagcagctgggtgctaataacagaaacac

SEQ ID NO: 412 - DNA, 60 bp, Artificial Sequence
  Probe
gttggatgactggatagtcaaaggaagactgaagctagcatatgtctctccaccacatct

SEQ ID NO: 413 - DNA, 60 bp, Artificial Sequence
  Probe
acagggatgacctgaagaaattgctagagaccgagtgtcctcagtatatcaggaaaaagg

SEQ ID NO: 414 - DNA, 60 bp, Artificial Sequence
  Probe
ctactctgggacactgacttgccagaatcctcttgtatccttcttcatcctgactttcat

SEQ ID NO: 415 - DNA, 60 bp, Artificial Sequence
  Probe
tctgggaaccagatgcaagtaagctgaatgagaattactgccgaaatccagatgatgatg

SEQ ID NO: 416 - DNA, 60 bp, Artificial Sequence
  Probe
tggttaagaagaccactggaggagtagacagattacacggacaggaaagaagcaaagaat

SEQ ID NO: 417 - DNA, 60 bp, Artificial Sequence
  Probe
agctgagaacttcactattttcatcaagaacagcatccgtttccccctcttcaactttga

SEQ ID NO: 418 - DNA, 60 bp, Artificial Sequence
  Probe
cattgaggaggtagattaggggcctttccaagattgctgtttttgttttggagcttcaag

SEQ ID NO: 419 - DNA, 60 bp, Artificial Sequence
  Probe
gtccattcgttcactcatccgtttattcagtaaatagacattgaccaccccataccaggc

SEQ ID NO: 420 - DNA, 60 bp, Artificial Sequence
  Probe
attccaggtgttctaaatcttgctaagaacccggtgggaataaaggttgcatgtacagag

SEQ ID NO: 421 - DNA, 60 bp, Artificial Sequence
  Probe
tatgatcactgtaccacagacagtgcttgtgtctccaaattccagaagtgtagctagtgt

SEQ ID NO: 422 - DNA, 60 bp, Artificial Sequence
  Probe
ctgacagtgggagtcttcgaagagatatgcaaccattgtctccaatttctgtccatgaac

SEQ ID NO: 423 - DNA, 60 bp, Artificial Sequence
  Probe
ggactccctcttcatacctcttggactctaacatcctgctccatactacctattaccctt

SEQ ID NO: 424 - DNA, 60 bp, Artificial Sequence
  Probe
actaaactggcagcttcacattttcttgctcattcttctctctatgcacacaaggggtaa

SEQ ID NO: 425 - DNA, 60 bp, Artificial Sequence
  Probe
cctggagaatcccttcttttgtagcagctctgtgtcttcaagggcatcattatgttatcc

SEQ ID NO: 426 - DNA, 60 bp, Artificial Sequence
  Probe
tttggcaaaactgattgcatggagcacttctgttgaacaggcaattcaagcatttatgtg

SEQ ID NO: 427 - DNA, 60 bp, Artificial Sequence
  Probe
aaaggtctggattggagagacatttgggagttggctacatatagatggtatctcaagcca

SEQ ID NO: 428 - DNA, 60 bp, Artificial Sequence
  Probe
aatatcctctgaactgtgcagatcctacctctgaaaggtggtttcatggacatctctctg

SEQ ID NO: 429 - DNA, 60 bp, Artificial Sequence
  Probe
ccattatccttatggagatggtaatcgtagtgttccacaatcaggaccgactgtacgacc

SEQ ID NO: 430 - DNA, 60 bp, Artificial Sequence
  Probe
gagaaattgttggcgtagatttggcttctggtatgtgtttctgattgcttcctgttgagc

SEQ ID NO: 431 - DNA, 60 bp, Artificial Sequence
  Probe
tgtgtctgctgttgttattatcattagccagaccaggttaagctctctctctcacacaca

SEQ ID NO: 432 - DNA, 60 bp, Artificial Sequence
  Probe
tgactatcagagtttggcttgtgtttggctgatgagcaaacctggaatgaatcagtgata

SEQ ID NO: 433 - DNA, 60 bp, Artificial Sequence
  Probe
ctaggatgtgttgaagggcacactgtctgcatatagtgagtgattgaagaacatgttggg

SEQ ID NO: 434 - DNA, 60 bp, Artificial Sequence
  Probe
atggacctttaatttgcagacaccaactagtttcaacatgctctgccttactctccaagt

SEQ ID NO: 435 - DNA, 60 bp, Artificial Sequence
  Probe
ctgtggttggcagtatgaccagaatcatggaatttgctagaactgtggaagcttctactc

SEQ ID NO: 436 - DNA, 60 bp, Artificial Sequence
  Probe
caaacatcctctaaagccagacaatcagccctttcctcaatcagtctctgaatcatgtcc

SEQ ID NO: 437 - DNA, 60 bp, Artificial Sequence
  Probe
atttgaaatggaaatgtctcagactggcttcagtgctcattattcacaggactgggtcat

SEQ ID NO: 438 - DNA, 60 bp, Artificial Sequence
  Probe
ccaagccttcctgctgtagacacaagctacattaatacctccctcatccaagactatagg

SEQ ID NO: 439 - DNA, 60 bp, Artificial Sequence
  Probe
tagccagctggagataatttaccagggaatgtttcaaagccctaaccttgaagtttggaa

SEQ ID NO: 440 - DNA, 60 bp, Artificial Sequence
  Probe
gaatgggagaagtatagacacatctccactccacctcaagtgaactatctggctttgtgt

SEQ ID NO: 441 - DNA, 60 bp, Artificial Sequence
  Probe
tgtcagctggaagctttttgatgtgctacagcaaaaggctaagaaatggcgtattgaaat

SEQ ID NO: 442 - DNA, 60 bp, Artificial Sequence
  Probe
tccttgacttgtttctgactttaaaggggatgctcctgaagtttcactgttagcgtgatg

SEQ ID NO: 443 - DNA, 60 bp, Artificial Sequence
  Probe
gctattatacagaaggtgaggccaaaaatgctggagacactgctcctgaatctcagtttt

SEQ ID NO: 444 - DNA, 60 bp, Artificial Sequence
  Probe
tgcttagttactggttttctccattgcattgttaggcatggtgacaagtgacagagttct

SEQ ID NO: 445 - DNA, 60 bp, Artificial Sequence
  Probe
tgtatccatggcaatttgctttcccctcactgaactgagatcagaatgttactctgttgg

SEQ ID NO: 446 - DNA, 60 bp, Artificial Sequence
  Probe
tgaggcagattagacttaagactgtaaggagtggttaaggactagggcagagcaaaacac

SEQ ID NO: 447 - DNA, 60 bp, Artificial Sequence
  Probe
aggttaaagaaaacaagaaacacaatcagaccacagaaaagccaggcagaaaagggttcg

SEQ ID NO: 448 - DNA, 60 bp, Artificial Sequence
  Probe
ataaggagctgattctgctaggagcaaggtcttatctccacgatattccaaaaggtcagg

SEQ ID NO: 449 - DNA, 60 bp, Artificial Sequence
  Probe
tttattggcatcttattcgactaaggctacccatttctcttccttcgtgcaccaattgct

SEQ ID NO: 450 - DNA, 60 bp, Artificial Sequence
  Probe
aaaaaagcaacagaaacctatcctcactgccctccccagtctctcttaaagttggaattt

SEQ ID NO: 451 - DNA, 60 bp, Artificial Sequence
  Probe
ctggcaagacagcataactctgcatctgctgtaacccagtgttaaattttcaaaggcttc

SEQ ID NO: 452 - DNA, 60 bp, Artificial Sequence
  Probe
aagcaaccttgctctaccttccctctgatagggacatttagtcatctttgcatgtctact

SEQ ID NO: 453 - DNA, 60 bp, Artificial Sequence
  Probe
agtaagcaaatgggcaaaaaatgaaatgtaaatgtgcaacccggaattggcaactctgtg

SEQ ID NO: 454 - DNA, 60 bp, Artificial Sequence
  Probe
attccccagacatcaagaaccgtacttgagcaggttcttccaatatagctatctgagctc

SEQ ID NO: 455 - DNA, 60 bp, Artificial Sequence
  Probe
ctttggagattaaggcccctcagagatcaacagaccaacatttttctcttcctcaagcaa

SEQ ID NO: 456 - DNA, 60 bp, Artificial Sequence
  Probe
aatcacccgtcattcggaggtttgtgtatggggaagatcagctcagcattatttttacaa

SEQ ID NO: 457 - DNA, 60 bp, Artificial Sequence
  Probe
ctactcggccagcggtttacctgatagattcggtaatactatcaagagaagagcctagga

SEQ ID NO: 458 - DNA, 60 bp, Artificial Sequence
  Probe
tctgttctttgtgttcagtctcacagaaaaactgagcaaacaaggaagacccttgaacga

SEQ ID NO: 459 - DNA, 60 bp, Artificial Sequence
  Probe
tgggtcaagaagtacttctccttcatcttcctttgatgtcggtaactcatcctttctgca

SEQ ID NO: 460 - DNA, 60 bp, Artificial Sequence
  Probe
agcacatgtgtgagaaaagcagagaaacaacaaggtatctgatgcttctgagaacacgag

SEQ ID NO: 461 - DNA, 60 bp, Artificial Sequence
  Probe
tccatcctgagagggattaataggacatgtgtagaaacagacttacacctcctctctccc

SEQ ID NO: 462 - DNA, 60 bp, Artificial Sequence
  Probe
cagtaatagacctgaagctggaacccatgtctaatagtgtcaggtccagtgttcttagcc

SEQ ID NO: 463 - DNA, 60 bp, Artificial Sequence
  Probe
ctgtggaaatacttcacatttgcattccaggactgttttggatccatttgcccgagaatc

SEQ ID NO: 464 - DNA, 60 bp, Artificial Sequence
  Probe
gaagagtctcatacaacggaagaggcgttatatgagacaccaaagtccacgttgagtctt

SEQ ID NO: 465 - DNA, 60 bp, Artificial Sequence
  Probe
gttttcctgcacttcagtctatgtctgtgtgtcagtccctctcactagtctctttctgtg

SEQ ID NO: 466 - DNA, 60 bp, Artificial Sequence
  Probe
tctctcgtcctcctctcttagaagctttgatgtcattctgttccttccgtgtctctctag

SEQ ID NO: 467 - DNA, 60 bp, Artificial Sequence
  Probe
ggcactcaaagtatttgtcgactgaaaaaaactgatgatgtttgggctgctgactactgc

SEQ ID NO: 468 - DNA, 60 bp, Artificial Sequence
  Probe
ctgcatcttcaatttttgttgtccctagccctccaaatgctggaataagtggaaatggac

SEQ ID NO: 469 - DNA, 60 bp, Artificial Sequence
  Probe
ctgagacctctaagaagtccagatactaagagcaaagatgtttcaaactgggggcctcat

SEQ ID NO: 470 - DNA, 60 bp, Artificial Sequence
  Probe
atgtatcccaggagagtccagtgataactgcacagctttagttcagacagaagacaatcc

SEQ ID NO: 471 - DNA, 60 bp, Artificial Sequence
  Probe
tcagtaaggagtgtcttgggaatgcagactgcttgaggacaaaaaaactagggtgaaaag

SEQ ID NO: 472 - DNA, 60 bp, Artificial Sequence
  Probe
catatcctacagaagaccaggcttctctctggtccttggtagagggctactttactgtaa

SEQ ID NO: 473 - DNA, 60 bp, Artificial Sequence
  Probe
cacccctcttcttgctatctcctataccaataaatacgaagggctgtggaagatcagagc

SEQ ID NO: 474 - DNA, 60 bp, Artificial Sequence
  Probe
aatggccagtgagatcaatgtgacggcagggaaatgtatgtgtgtctattttgtaactgt

SEQ ID NO: 475 - DNA, 60 bp, Artificial Sequence
  Probe
tatccatctcaagtagcctagcaatatttgcaacatcccaatggccctgtccttttcttt

SEQ ID NO: 476 - DNA, 60 bp, Artificial Sequence
  Probe
acctttgttgcccagcaaagccaaaacactgagttctggccaatgagatataagaaaatt

SEQ ID NO: 477 - DNA, 60 bp, Artificial Sequence
  Probe
atctttgcagctaccataatcaccctctctctctctttgcctgtgccttccatagaataa

SEQ ID NO: 478 - DNA, 60 bp, Artificial Sequence
  Probe
gccacattctctaaggaagaacacagcagaacaatagcatctgttttgtttctgcatggc

SEQ ID NO: 479 - DNA, 60 bp, Artificial Sequence
  Probe
ttttaagggaagccagtggcagatggagagccatcagatgaaactgttattaatcacacc

SEQ ID NO: 480 - DNA, 60 bp, Artificial Sequence
  Probe
atcagtcattcaggagggtcttactgaaagctctcatgtttccccaaaagtagtgaagga

SEQ ID NO: 481 - DNA, 60 bp, Artificial Sequence
  Probe
cgatctctgtcacaactgttcaattctgtcctagtagcaagaaagcagccacagacaaac

SEQ ID NO: 482 - DNA, 60 bp, Artificial Sequence
  Probe
gatgcaggttggtaattagatgtgatggggcataataaggtaggaggggttttttggtgt

SEQ ID NO: 483 - DNA, 60 bp, Artificial Sequence
  Probe
accacagcttaacaacatagattctgaaatcagcgatctgggtttgaggtgtgattcacc

SEQ ID NO: 484 - DNA, 60 bp, Artificial Sequence
  Probe
ggacagctagaaaacacaaaatcttgtaggtcattgcacctatctcagccataggtgcag

SEQ ID NO: 485 - DNA, 60 bp, Artificial Sequence
  Probe
tttccattctacagaagggaaaactgagtaaatctgcctgtggccattcctgtcaaagac

SEQ ID NO: 486 - DNA, 60 bp, Artificial Sequence
  Probe
caaggattgacagccatcatcagaagctcggaagaaacaaggaaggattgattctatgca

SEQ ID NO: 487 - DNA, 60 bp, Artificial Sequence
  Probe
tcatgaaacgagattcaaagaaaggctgcgacttgcccagggtcacatagttacttaaag

SEQ ID NO: 488 - DNA, 60 bp, Artificial Sequence
  Probe
ggccagactgcctgagttcaaatctagttctacagcataccaactatatgacccaagtga

SEQ ID NO: 489 - DNA, 60 bp, Artificial Sequence
  Probe
atgttgtccgtggaaacaaaccaatttctacaatgtccgtgcagtcctaagcatttttcc

SEQ ID NO: 490 - DNA, 60 bp, Artificial Sequence
  Probe
atttttctctcaggctaaccaaaaccatgttgaaatgaaaaccaccttggaactggcctt

SEQ ID NO: 491 - DNA, 60 bp, Artificial Sequence
  Probe
ctaggagaccttatgttctgcttgtaggctgaaggtagatgttgctaatcacagcactgt

SEQ ID NO: 492 - DNA, 60 bp, Artificial Sequence
  Probe
cgaaaagatgctgagcgacagctattgtcctttggaaacccaagaggtacctttcttatc

SEQ ID NO: 493 - DNA, 60 bp, Artificial Sequence
  Probe
gtgtcatacatattgccttgaaagaaaggacattcaggtgtcccttcggggttctgtaac

SEQ ID NO: 494 - DNA, 60 bp, Artificial Sequence
  Probe
ccaacaggtttaaccccaagaccttcttcatactgcatgatatcaacagtgatggtgtcc

SEQ ID NO: 495 - DNA, 60 bp, Artificial Sequence
  Probe
atatcgtacagctgtctgcattgaaaattcatgcatggagaaagggagtaagcaagggag

SEQ ID NO: 496 - DNA, 60 bp, Artificial Sequence
  Probe
ttagtggtattcactgtgtatgtgacacaccagcatgggttagtggtattcctccatgat

SEQ ID NO: 497 - DNA, 60 bp, Artificial Sequence
  Probe
ctcttcctccccttcttaaacacgaacaggctaaattgtccatttctccagcagttttga

SEQ ID NO: 498 - DNA, 60 bp, Artificial Sequence
  Probe
tctcactcattgcacttcctggagttaaattttccaacagccatgttgaggaatagcact

SEQ ID NO: 499 - DNA, 60 bp, Artificial Sequence
  Probe
ctatgcccatcttatagtcttggaagacaaaaggctggtagagacagtcttcagtggctt

SEQ ID NO: 500 - DNA, 60 bp, Artificial Sequence
  Probe
acctccaggaactgtaaacaggaacacctatgtgtaactgaaggcatgagacatctgtac

SEQ ID NO: 501 - DNA, 60 bp, Artificial Sequence
  Probe
gatgtcattcacaagtataagccttggaggcggaacataactcgaagaagagcccttttg

SEQ ID NO: 502 - DNA, 60 bp, Artificial Sequence
  Probe
aggaagcaagacgtaaagaattttcatcccgtatcacagtgtttttattgctcgcccaga

SEQ ID NO: 503 - DNA, 60 bp, Artificial Sequence
  Probe
ctcctatgaccactgtctatgtaaacaccccactttttctacactggttctcctaggcac

SEQ ID NO: 504 - DNA, 60 bp, Artificial Sequence
  Probe
tcatttttcagtggaggtagctgaagttcaaagaggttcagtgatttgcttccaacctgt

SEQ ID NO: 505 - DNA, 60 bp, Artificial Sequence
  Probe
gtagatatgtttaagttccggggaccatctacagttggagatcgtcttgtcttcactgcc

SEQ ID NO: 506 - DNA, 60 bp, Artificial Sequence
  Probe
caaagcaggttcctgattcccagcttcccaattatgtagagataactgttgccttagcag

SEQ ID NO: 507 - DNA, 60 bp, Artificial Sequence
  Probe
gcctttacatcttttggcaaaaagctaaccaagaacaagatgcttcacccggatacgttt

SEQ ID NO: 508 - DNA, 60 bp, Artificial Sequence
  Probe
catttctcgagtgaatgcaaaaaatcccttctttggctatgctgggccttataagcacac

SEQ ID NO: 509 - DNA, 60 bp, Artificial Sequence
  Probe
catcgtattcatcctgagaaagggaaacctaaagacttgggagagtgttctgggaggaaa

SEQ ID NO: 510 - DNA, 60 bp, Artificial Sequence
  Probe
aatgccccccttagttctgggaaaggggaagaaatagtgttactagaacctgattgagag

SEQ ID NO: 511 - DNA, 60 bp, Artificial Sequence
  Probe
tagttacaggaaggtaatttggcatgcagccactatttttgagttgatgcaagcctctct

SEQ ID NO: 512 - DNA, 60 bp, Artificial Sequence
  Probe
tggaaacactgtcttctcttgccgttgttttcctctctccagtgttatatcaagtgagga

SEQ ID NO: 513 - DNA, 60 bp, Artificial Sequence
  Probe
aaaaatcaaaaccgcaataaatccagctctcatcaggactcctccagaatgtccagtgtt

SEQ ID NO: 514 - DNA, 60 bp, Artificial Sequence
  Probe
gaacagcagatcagggctgcttctagtttggaggaactacttcgaattactcactctgag

SEQ ID NO: 515 - DNA, 60 bp, Artificial Sequence
  Probe
aagatgaaactccccttacttctggctcttctatttggggcagtttctgctcttcatcta

SEQ ID NO: 516 - DNA, 60 bp, Artificial Sequence
  Probe
tgtaagtgacttacttccagggaatcatgccctatttctaccagcaggtcatacccaaat

SEQ ID NO: 517 - DNA, 60 bp, Artificial Sequence
  Probe
gtggatgataaaatctatgtagttgcaggcaaagaccttcaaacagaggcttcgctggat

SEQ ID NO: 518 - DNA, 60 bp, Artificial Sequence
  Probe
aagatattggggaggggaagtatttcgtagtcctatgatggggactctgacttttaggga

SEQ ID NO: 519 - DNA, 60 bp, Artificial Sequence
  Probe
actgtcccactactcttgggacaatttaatgagatcagatgtgaagagcactcaaccctt

SEQ ID NO: 520 - DNA, 60 bp, Artificial Sequence
  Probe
gaatgctaacacttaagcacagactagagcttgcttgggtttcttcctgcattacaaggt

SEQ ID NO: 521 - DNA, 60 bp, Artificial Sequence
  Probe
ttccaaggcaactgcccttcatacatcaactgagtgatacatctcttccctcttgtagtt

SEQ ID NO: 522 - DNA, 60 bp, Artificial Sequence
  Probe
gtccctcttcctggaagctattttcctagctgtctgcatggtgagttcctcatttttttc

SEQ ID NO: 523 - DNA, 60 bp, Artificial Sequence
  Probe
tgagatgacaaactctatctagcctggtttgagctctgtgaattgcttcaggaggttctt

SEQ ID NO: 524 - DNA, 60 bp, Artificial Sequence
  Probe
ggaaatggagattctggaaggataaaggccagtgagaaggcatgataaacatccatgagc

SEQ ID NO: 525 - DNA, 60 bp, Artificial Sequence
  Probe
ctcagctagaactcctcgatttggcatttacccgcttacacattaatgctccacaaagtc

SEQ ID NO: 526 - DNA, 60 bp, Artificial Sequence
  Probe
acacaaccaagggagaaaactattctgtcaaagagacggtgccaaaaggcaaaaacaaag

SEQ ID NO: 527 - DNA, 60 bp, Artificial Sequence
  Probe
gggttgaagagtagaggagggatttgagagctattgaggatatcttggtgactgagggta

SEQ ID NO: 528 - DNA, 60 bp, Artificial Sequence
  Probe
tgagtaggtgaaacaggaaatactcaatttccagatcctcttgtgcatcctccttgctct

SEQ ID NO: 529 - DNA, 60 bp, Artificial Sequence
  Probe
ttgcaataagtgaaatgctgctctaggtagaagctctccctgctgtttttaagaagccac

SEQ ID NO: 530 - DNA, 60 bp, Artificial Sequence
  Probe
gcaagtctaaagtgacccatgttatgattcgctgtcaggaactgaaatacgacgttggtg

SEQ ID NO: 531 - DNA, 60 bp, Artificial Sequence
  Probe
atgacagaatttcagaggcaggaaagtgtccggtcccagcataaaggtatccagttatat

SEQ ID NO: 532 - DNA, 60 bp, Artificial Sequence
  Probe
atgcacagaagacatcccagctcataaatgtaccttgcaaagtcttatttcccacccaat

SEQ ID NO: 533 - DNA, 60 bp, Artificial Sequence
  Probe
tcagacttctgaggatgggagtaagccagacaaggtatctagtcaggaatagggaagttg

SEQ ID NO: 534 - DNA, 60 bp, Artificial Sequence
  Probe
acagctctccccaccctttgggaaattaacttctaggaaaagaaaaagagacacagttgc

SEQ ID NO: 535 - DNA, 60 bp, Artificial Sequence
  Probe
cacaaaccttacagaaggaatagcagagcaagatcacatctccaccactgtcctcagtta

SEQ ID NO: 536 - DNA, 60 bp, Artificial Sequence
  Probe
gagacagaagaatgccagaccccagaggacctcatgttatgtaagaaatagcaatcacct

SEQ ID NO: 537 - DNA, 60 bp, Artificial Sequence
  Probe
gccaatgcccctgagattaaatgctgatccccattagatctacacatgttcagctttctt

SEQ ID NO: 538 - DNA, 60 bp, Artificial Sequence
  Probe
cctcctcctcaaagcctcacatgaatcttctttgaggtactctctgatgcttcactcttc

SEQ ID NO: 539 - DNA, 60 bp, Artificial Sequence
  Probe
ccccaggactttatcaacttgttcaagttctgaatcccagcacatgacaacacttcagaa

SEQ ID NO: 540 - DNA, 60 bp, Artificial Sequence
  Probe
actgttactgaacatacctttcagttctctccttctaggatgctgtttgggctttcctgt

SEQ ID NO: 541 - DNA, 60 bp, Artificial Sequence
  Probe
gtggttgccccatattctgccttctgatccttaaccaataaaacttggcttttgtttccc

SEQ ID NO: 542 - DNA, 60 bp, Artificial Sequence
  Probe
ctgcctctctgaatcttttccgcaactcgcctcttacttccattttacaggtgagaaaac

SEQ ID NO: 543 - DNA, 60 bp, Artificial Sequence
  Probe
cacctcttaatttcctgcctgtgtcttgtgtggttgcatctacttcagaccaaaagacaa

SEQ ID NO: 544 - DNA, 60 bp, Artificial Sequence
  Probe
tgggatccagactactttagcccatttaaccctttgaagtcaaggaataagtctcctggg

SEQ ID NO: 545 - DNA, 60 bp, Artificial Sequence
  Probe
ccaaatggttaaaccctgtctccactgtaaatatgtaactcagctgggcatggtaatggg

SEQ ID NO: 546 - DNA, 60 bp, Artificial Sequence
  Probe
caagtagtgggggactccttcacccactagactgtgatatttctctctggaaagagaaga

SEQ ID NO: 547 - DNA, 60 bp, Artificial Sequence
  Probe
tcttttacctgctgcttctccaaaaatctgcctgggttttgttccctatttttctctcct

SEQ ID NO: 548 - DNA, 60 bp, Artificial Sequence
  Probe
tcagtggtttccttcttgatctctcttattttctccaaccacccccctttactcttaggc

SEQ ID NO: 549 - DNA, 60 bp, Artificial Sequence
  Probe
caccagccacgtgcacagcagttgcttttactagtcttagctctacgatttaaatccatg

SEQ ID NO: 550 - DNA, 60 bp, Artificial Sequence
  Probe
agatgtaatgaagtccccgaatgtatctgtttctaaggagcctcttggcagtccttaagc

SEQ ID NO: 551 - DNA, 60 bp, Artificial Sequence
  Probe
gaataatccccactctgctcttaggattgaatccacccccattctgtacatagcctcttc

SEQ ID NO: 552 - DNA, 60 bp, Artificial Sequence
  Probe
ttggagggtctctcatggctgttacaactttcatgtagaagggccacacatataactcat

SEQ ID NO: 553 - DNA, 60 bp, Artificial Sequence
  Probe
acacatagtcgaaattataagtcccaggtttgttaggaagctaaaggaaggagaggggcc

SEQ ID NO: 554 - DNA, 60 bp, Artificial Sequence
  Probe
gctgaacagagtagtcacccgcttgccatatgagaatcttttaatttgtgcctcagaagg

SEQ ID NO: 555 - DNA, 60 bp, Artificial Sequence
  Probe
taaaatggccttcaattgtggttgtgcagcagaatcagctggagagtctttggaaaaatg

SEQ ID NO: 556 - DNA, 60 bp, Artificial Sequence
  Probe
atgactgatttagcaaaaccataattcatcctctgaggcttgtgaaggggcaggattcac

SEQ ID NO: 557 - DNA, 60 bp, Artificial Sequence
  Probe
gtagcagacaattattgatgtttgctagttatggaaggcggggcagaattagtcaccgtg

SEQ ID NO: 558 - DNA, 60 bp, Artificial Sequence
  Probe
tgatgaagtgagaaaagagagcctcaggattcattagggtgttttcaggcttacatccct

SEQ ID NO: 559 - DNA, 60 bp, Artificial Sequence
  Probe
tttcccagtccaatacttttcaaaggggtttttccctccattgtgtgtattctgtgggat

SEQ ID NO: 560 - DNA, 60 bp, Artificial Sequence
  Probe
ctgggggagacaggattttgcaattttaaacaggacagtcaagaaaagctgcatggaaag

SEQ ID NO: 561 - DNA, 60 bp, Artificial Sequence
  Probe
tccctcttggaggaaaaatagaagtaagttgtctcaggtcagattgtctgggaagccaag

SEQ ID NO: 562 - DNA, 60 bp, Artificial Sequence
  Probe
actctcattatttccattgcatttatgtttcccagttcagcagctgcagttcccactgta

SEQ ID NO: 563 - DNA, 60 bp, Artificial Sequence
  Probe
gagtgtctgtgaaccaggtccgttctgtccactgagctgtacttacgtctagatgtataa

SEQ ID NO: 564 - DNA, 60 bp, Artificial Sequence
  Probe
ctgctaatgtgtatttgagcctgaaatgcacattgtcccacctttcctcaatggcaaaat

SEQ ID NO: 565 - DNA, 60 bp, Artificial Sequence
  Probe
ggaattctgaccctaagtatcgttcatgtttcctgacccttttctgcctcctcatctctt

SEQ ID NO: 566 - DNA, 60 bp, Artificial Sequence
  Probe
aaatagctgagggtttaaagccacttagacttctagccaagtcctgctccatccttactg

SEQ ID NO: 567 - DNA, 60 bp, Artificial Sequence
  Probe
agcatacctgagactaaccctatggtctaagaagaacttacgtttggagtcctgggctaa

SEQ ID NO: 568 - DNA, 60 bp, Artificial Sequence
  Probe
catgatccccagaccacaacaaaccaaaacataaactcatgtctgtgtcccatggtcata

SEQ ID NO: 569 - DNA, 60 bp, Artificial Sequence
  Probe
attctcaggaactctccttctttgggtctggctgaagttgaggatctcttactctctagg

SEQ ID NO: 570 - DNA, 60 bp, Artificial Sequence
  Probe
ttgacagaagccaagtaaggaactgaagttgtatctgactgtagggtgaatgtctgaggc

SEQ ID NO: 571 - DNA, 60 bp, Artificial Sequence
  Probe
ggggtcgcagattgtgatagacagtcttacatagagtgacatggggtatagaggggtatt

SEQ ID NO: 572 - DNA, 60 bp, Artificial Sequence
  Probe
agtttcaaatcagatgaaggcgtggatgcacttagtaaactgtagagtgctttgcacctg

SEQ ID NO: 573 - DNA, 60 bp, Artificial Sequence
  Probe
ttaaaggacacttgttgcttctcacgtgcagaaaacaagggctgcttctagataatcacc

SEQ ID NO: 574 - DNA, 60 bp, Artificial Sequence
  Probe
ggctctagtgtcaccctgttgatttcctctgaaatggtgaagttcatttccctgtttgtt

SEQ ID NO: 575 - DNA, 60 bp, Artificial Sequence
  Probe
ccttaccataattcagagtccagaagagcacctaaaggaactggagatgttgcacactga

SEQ ID NO: 576 - DNA, 60 bp, Artificial Sequence
  Probe
ctagcaaattcggcttttgccgttgatctgttcaaacaactatgtgaaaaggagccactg

SEQ ID NO: 577 - DNA, 60 bp, Artificial Sequence
  Probe
cctctgaggatgatgtacttgccctgaccatgcattttaccatcacacatgttcagaaag

SEQ ID NO: 578 - DNA, 60 bp, Artificial Sequence
  Probe
ttgccatgataccatcgtggaaatgaaagacaacgtgaaaatcctgcgtccttgtgatat

SEQ ID NO: 579 - DNA, 60 bp, Artificial Sequence
  Probe
ggttcaaacagtgtacaggttctagggtcctgtctagctttatgaacaggagcaaatcct

SEQ ID NO: 580 - DNA, 60 bp, Artificial Sequence
  Probe
gactgttaggagcagtattgagtggctgtcacactttgaggcaactaaaaaggcttcaaa

SEQ ID NO: 581 - DNA, 60 bp, Artificial Sequence
  Probe
gaggtgcttgaactcgctttctccatcttgtatgactcaaactgccaactgaacttcatc

SEQ ID NO: 582 - DNA, 60 bp, Artificial Sequence
  Probe
ctggctcttcttaactttctctgctctctccttatttggatggtaggtttgacacaggct

SEQ ID NO: 583 - DNA, 60 bp, Artificial Sequence
  Probe
caaatcgagagctgttctgcctcatgacccactaatgagaataagtgggatgtcagagag

SEQ ID NO: 584 - DNA, 60 bp, Artificial Sequence
  Probe
agggaagatgttagtatctgtaccaccctcttggtttgatcagaaagggcaatgcatgta

SEQ ID NO: 585 - DNA, 60 bp, Artificial Sequence
  Probe
agagattgtgtgacttggtttaaaaaaacacggaacccaaccatacgctctttccagaca

SEQ ID NO: 586 - DNA, 60 bp, Artificial Sequence
  Probe
tttgtgtctatgctaccagaaggaggagaggatgacacttcctctctgtttcccagatta

SEQ ID NO: 587 - DNA, 60 bp, Artificial Sequence
  Probe
gctcacctcccaagtttcatggctgcaattctctctgatcttcatcaaggatcttcattg

SEQ ID NO: 588 - DNA, 60 bp, Artificial Sequence
  Probe
ttatgaaggatccaagactttcatctttgaatcccctaccctaaagcctggcctgatcat

SEQ ID NO: 589 - DNA, 60 bp, Artificial Sequence
  Probe
aagtgagctcataacctgccatgggcaagttttatatcaggtagtgtacacaggtgagag

SEQ ID NO: 590 - DNA, 60 bp, Artificial Sequence
  Probe
ttaaaatgggaggtgcttctgatgtatctaccgctaaatccccattcagtgcagtaggag

SEQ ID NO: 591 - DNA, 60 bp, Artificial Sequence
  Probe
tggatggtgttgacttctgactctaaaagcaatcaaacatgtttctgctggacagtgacc

SEQ ID NO: 592 - DNA, 60 bp, Artificial Sequence
  Probe
acctctgctggactcatgaattcaggtatttctgggaggttctgggttactctagagtag

SEQ ID NO: 593 - DNA, 60 bp, Artificial Sequence
  Probe
tgtcctgtatgtgggagtagtgacaaaacagcacatggtgtgatagaatgagatggactg

SEQ ID NO: 594 - DNA, 60 bp, Artificial Sequence
  Probe
aatgcagctgagagatcacatgaaatgagaacagagaaatgatggctgggtttggtaacg

SEQ ID NO: 595 - DNA, 60 bp, Artificial Sequence
  Probe
ggttgattcaatgccttgggaactatttttgcacattggaagcctcaaaaacagtccaga

SEQ ID NO: 596 - DNA, 60 bp, Artificial Sequence
  Probe
gaatggtaaagttgaagacccagagagcactttgtttggttctgtcatccgctacacttg

SEQ ID NO: 597 - DNA, 60 bp, Artificial Sequence
  Probe
ttacacctttgatggagctctaaacaagtccactgtccccactgactttagtagtgcaaa

SEQ ID NO: 598 - DNA, 60 bp, Artificial Sequence
  Probe
aattattgctatcattagggctatggggaggttgaagatagactttggtgactcagcccg

SEQ ID NO: 599 - DNA, 60 bp, Artificial Sequence
  Probe
gtccagttcttcccccttcacataaaggaacatggtttgtcagcctttctcctgtttatg

SEQ ID NO: 600 - DNA, 60 bp, Artificial Sequence
  Probe
ccccaaagcctcttcttcttcagggaaaacaccttcagttcttttaactattcccatggg

SEQ ID NO: 601 - DNA, 60 bp, Artificial Sequence
  Probe
aactgggacctaggaaaatgagtcatccttggtcatgcacatttcaaatggtggcttaat

SEQ ID NO: 602 - DNA, 60 bp, Artificial Sequence
  Probe
cagacagaaatccaggtgaacttgagagaattagagacagctgcctggttcagtcatgat

SEQ ID NO: 603 - DNA, 60 bp, Artificial Sequence
  Probe
caaaagtgcaatggattgcttctcatgagcttcccgttactagaagcgctcaaataggaa

SEQ ID NO: 604 - DNA, 60 bp, Artificial Sequence
  Probe
ctgaatgaaaagtgctcctaaaatctttcctgtccccttttaagacttcactgggcaggg

SEQ ID NO: 605 - DNA, 60 bp, Artificial Sequence
  Probe
aactcccatgtgctaggtaatgtatgaggtgccagagttacccaaaaaacaaacaaagca

SEQ ID NO: 606 - DNA, 60 bp, Artificial Sequence
  Probe
ctttcttacccagaagcagaaggtgggagaactgaaggatgacgactttgagaagatcag

SEQ ID NO: 607 - DNA, 60 bp, Artificial Sequence
  Probe
cttctaagaccctggaagactcttagaagtccttgaggtccagcctaaaggagaattcct

SEQ ID NO: 608 - DNA, 60 bp, Artificial Sequence
  Probe
catcctcgaggttttcataggcttccagcttcctgttctccttagctcaattgttcacta

SEQ ID NO: 609 - DNA, 60 bp, Artificial Sequence
  Probe
gtaaagagcaacacaattctttgtaaagccattggccccacagaaagctccatggaaaat

SEQ ID NO: 610 - DNA, 60 bp, Artificial Sequence
  Probe
taggaattagagccctctctgcaatatcatcgttgttttcctggcacaatgggagtgtat

SEQ ID NO: 611 - DNA, 60 bp, Artificial Sequence
  Probe
ctttatctgtggaatgggatggtaactcagccctcacaagatgctatgaggaatgagagg

SEQ ID NO: 612 - DNA, 60 bp, Artificial Sequence
  Probe
cagagttagtggtacagactctagggttgtggtttcttcacggaacctgttttaaggcat

SEQ ID NO: 613 - DNA, 60 bp, Artificial Sequence
  Probe
tgccatcaaggaggccatcaccagaaattgattttcttcatgctacacatacttccatcc

SEQ ID NO: 614 - DNA, 60 bp, Artificial Sequence
  Probe
tcaacaccatgaatcttccaaagcgcaaagaagttatttgccgaggatctgatgacgatt

SEQ ID NO: 615 - DNA, 60 bp, Artificial Sequence
  Probe
caacatacctgattccccgacactggataccgaagatgaacccaaccattcacaaatttc

SEQ ID NO: 616 - DNA, 60 bp, Artificial Sequence
  Probe
cctgccaaatattcatatacctgtccacttggggtcatgaggagatgcaaatgaaacgtg

SEQ ID NO: 617 - DNA, 60 bp, Artificial Sequence
  Probe
ttcaagctagaactcaaaactccatacttgccaggtacacatggtcctgtttacccatct

SEQ ID NO: 618 - DNA, 60 bp, Artificial Sequence
  Probe
gatattgggactgagagataggaggccaggagaaggccaaagaaaaactgacttctgaag

SEQ ID NO: 619 - DNA, 60 bp, Artificial Sequence
  Probe
atgaaaggatcggatgaaggtcgttggtgactcactgctctgacgttttacttgaactag

SEQ ID NO: 620 - DNA, 60 bp, Artificial Sequence
  Probe
gtcaaaggccatctcacattttacaaatccccagctcatgaacgtgaagctgataggaaa

SEQ ID NO: 621 - DNA, 60 bp, Artificial Sequence
  Probe
gagatttttgatgaaaggtgtgctcgctctctgcgttctatcttctctctcctccttgtt

SEQ ID NO: 622 - DNA, 60 bp, Artificial Sequence
  Probe
ctctgacaatgagtgaaaagcgggaatttcctacagtgcccttggttaaattaggcagtt

SEQ ID NO: 623 - DNA, 60 bp, Artificial Sequence
  Probe
tggaggagaagtggatagattctgttggacataaaacagaggtgctggaaattaggcgtt

SEQ ID NO: 624 - DNA, 60 bp, Artificial Sequence
  Probe
tctctcctttcatggaatctccctgtgcaataaaggaaagctgaggacattctcccatac

SEQ ID NO: 625 - DNA, 60 bp, Artificial Sequence
  Probe
aaggcatcacattgcaccctgaattattttctatcgacaatggccttctgactccaacaa

SEQ ID NO: 626 - DNA, 60 bp, Artificial Sequence
  Probe
gtagtcttccttctgatgtgggcgccctacaatattgcatttttcctgtccactttcaaa

SEQ ID NO: 627 - DNA, 60 bp, Artificial Sequence
  Probe
aggactccagcaatgtggtccatctcattaagaatgcttacaataaactctcctccaggg

SEQ ID NO: 628 - DNA, 60 bp, Artificial Sequence
  Probe
gtactggaccaagatgctgtttctagtttttcagttcagcaggtggaaaaagagctggac

SEQ ID NO: 629 - DNA, 60 bp, Artificial Sequence
  Probe
aaagagcaaagtcaggaaacaaaacagagagcacagcaaaagctgcttgaaaacattcca

SEQ ID NO: 630 - DNA, 60 bp, Artificial Sequence
  Probe
tccttatgcctcagagtgtcattgggaggactcacgaaaatacgcttgtactttgagttc

SEQ ID NO: 631 - DNA, 60 bp, Artificial Sequence
  Probe
gcaatagcccacaattcctaaagtcctcagcctgtacatcacctgaaagaggacatctaa

SEQ ID NO: 632 - DNA, 60 bp, Artificial Sequence
  Probe
caatctgcacagatgctcttctgaagtaggcatgatagtccccatttgatagacgtggaa

SEQ ID NO: 633 - DNA, 60 bp, Artificial Sequence
  Probe
cacattccccttcttcccacagcctcctgtgtaggaaatcttatggaaatttcccaaaag

SEQ ID NO: 634 - DNA, 60 bp, Artificial Sequence
  Probe
agatgtagactggggaggttgactgatagccacctacttgaaggttgaagacagtcaata

SEQ ID NO: 635 - DNA, 60 bp, Artificial Sequence
  Probe
ctgcattctatgtgcaggatgaagaaagagaaggagaagaaagggcaaaaggcatgtacc

SEQ ID NO: 636 - DNA, 60 bp, Artificial Sequence
  Probe
ctcatgggtcaatactactgttattgttgctattgttattaccaggccccgccctcctaa

SEQ ID NO: 637 - DNA, 60 bp, Artificial Sequence
  Probe
gggcctaagaaggatgtgacatgtcctatgataaaggaccaggagtttgggatttgagag

SEQ ID NO: 638 - DNA, 60 bp, Artificial Sequence
  Probe
tcagtatcaaggtcatggtacaggatatgctcactggcattgagaagcttgttagtgtgg

SEQ ID NO: 639 - DNA, 60 bp, Artificial Sequence
  Probe
gcaaaaagcaatcagcaattggacaggaaaagaatggcattgaagcagatttccagcaac

SEQ ID NO: 640 - DNA, 60 bp, Artificial Sequence
  Probe
gctggagattctcagccagggacttgtgcatcagtgtgtatttcctatgtgtacagttat

SEQ ID NO: 641 - DNA, 60 bp, Artificial Sequence
  Probe
tgccaagaggaatgttaagttgattgccctttcaatagacagtgttgaggaccatcttgc

SEQ ID NO: 642 - DNA, 60 bp, Artificial Sequence
  Probe
gtagtttgggaacccctgacatatgacaatgcccccttagataagctcaagttacaggaa

SEQ ID NO: 643 - DNA, 60 bp, Artificial Sequence
  Probe
ttgtttgaagtggagaaggatggtgagaaagaagccttcagagaggaccttcataacagg

SEQ ID NO: 644 - DNA, 60 bp, Artificial Sequence
  Probe
gaagacagaagggcagtttgtggatctgacaggaaatagactgacctacacaaactggaa

SEQ ID NO: 645 - DNA, 60 bp, Artificial Sequence
  Probe
ccacagtgatggttaagaacgaggacagtctggtctttgtccagacagacaaatcaatct

SEQ ID NO: 646 - DNA, 60 bp, Artificial Sequence
  Probe
acagtgggaaggctgaaagtaagactgaaaggtaatttgggatcaggtgatggtattgga

SEQ ID NO: 647 - DNA, 60 bp, Artificial Sequence
  Probe
cttctgctcccggcccctccctttgtatttggagacaatgtgttgtaataaagcttaaag

SEQ ID NO: 648 - DNA, 60 bp, Artificial Sequence
  Probe
ggaagagaatggatgttaaaaaatgcaaggatagccattgggtagaacgccatacagcca

SEQ ID NO: 649 - DNA, 60 bp, Artificial Sequence
  Probe
tttggtggagaagtgggttttcaaatcatcaacactgcctcaattcagtctctcatctgc

SEQ ID NO: 650 - DNA, 60 bp, Artificial Sequence
  Probe
tagtgccatcaatgcacacagggacttttggagtcattgtagagttatgcactgtacaga

SEQ ID NO: 651 - DNA, 60 bp, Artificial Sequence
  Probe
tgtggcatgttatctaaagagtaaaggtaccatgcctttgcctttctgggccttgaaatc

SEQ ID NO: 652 - DNA, 60 bp, Artificial Sequence
  Probe
agcaatgaagtcatccactcctgcatctggttggtctttattgagcacctactatatgca

SEQ ID NO: 653 - DNA, 60 bp, Artificial Sequence
  Probe
accttctaattatagcttggtctttctggttgctagcccccattctgaagttgcctagtt

SEQ ID NO: 654 - DNA, 60 bp, Artificial Sequence
  Probe
gagaacccaggtcgtctttctattttcaggtcagctgattagccaccttagttccatctg

SEQ ID NO: 655 - DNA, 60 bp, Artificial Sequence
  Probe
tctgtttttcctgtctgatccaggagcacacattgcacttagctgtcatatccctttagt

SEQ ID NO: 656 - DNA, 60 bp, Artificial Sequence
  Probe
aaaggatctgggaagtggtagaatttctggtctgtacttttacaaatggagcccttggga

SEQ ID NO: 657 - DNA, 60 bp, Artificial Sequence
  Probe
gcctgtcactgctctgcctaagagatgtgttgtcaccctccttatttctgttactacttg

SEQ ID NO: 658 - DNA, 60 bp, Artificial Sequence
  Probe
ggctgtttcccagtaaaactggaattcctgtcgttactgtttccttatcaaagaaggggc

SEQ ID NO: 659 - DNA, 60 bp, Artificial Sequence
  Probe
actgtatgaggtaaggaggtggaagtcaatggtctaaagcagggatcattgagccttttc

SEQ ID NO: 660 - DNA, 60 bp, Artificial Sequence
  Probe
agacattctgctggaagcttgcacatattagctcagttaatcctcacaagaaccctcagt

SEQ ID NO: 661 - DNA, 60 bp, Artificial Sequence
  Probe
tccatttctactaactggagttgcagagggagagaagggattctgcttctacattcctga

SEQ ID NO: 662 - DNA, 60 bp, Artificial Sequence
  Probe
tgttgcagatcacaggaaatcatgacctaggccatcaatgttagaattccaattgcctgg

SEQ ID NO: 663 - DNA, 60 bp, Artificial Sequence
  Probe
atcgtgtgttggggattgtgtgtatattgcagattttgtatgtgtgttggggattgtggt

SEQ ID NO: 664 - DNA, 60 bp, Artificial Sequence
  Probe
ccggactctccaaagatttggaaaactttacaaaaccaagtggaatcaagcggataggct

SEQ ID NO: 665 - DNA, 60 bp, Artificial Sequence
  Probe
cttacagatctcttacactcgtggtgggaagagtttagtgtgaaactggggtggaattgg

SEQ ID NO: 666 - DNA, 60 bp, Artificial Sequence
  Probe
accaattgcattttctgtttgctgcttaacagcttccatgggagaaacgatcaacatgtg

SEQ ID NO: 667 - DNA, 60 bp, Artificial Sequence
  Probe
cagatccagcctgatcttcacactaatgatgagtgtgtggctacatacaaaggagttccc

SEQ ID NO: 668 - DNA, 60 bp, Artificial Sequence
  Probe
ctcaaaacatcaatgcctaccagagcctgccaggtaatgtaaatgagaaaagcagactgg

SEQ ID NO: 669 - DNA, 60 bp, Artificial Sequence
  Probe
tatactaaagaggtcctgttgccccaagcccaatgaaagagtcttcaagacgatcacttg

SEQ ID NO: 670 - DNA, 60 bp, Artificial Sequence
  Probe
cagaactgcagatccagactccacgcttgctttgtgcttaattgtacatctcattcacac

SEQ ID NO: 671 - DNA, 60 bp, Artificial Sequence
  Probe
gcagcttttgaatgctaagggttccagtatgtgacccaaagaaagagttgtctcaactcc

SEQ ID NO: 672 - DNA, 60 bp, Artificial Sequence
  Probe
tatctttacataggacgccagcagggaattttgttacactggaggaaggaaaaggagacc

SEQ ID NO: 673 - DNA, 60 bp, Artificial Sequence
  Probe
acattcaggttggggaaaggctttcagaaggaagacactgcagaaaaatcagttattgct

SEQ ID NO: 674 - DNA, 60 bp, Artificial Sequence
  Probe
tacccatgttagcagacagggagcttggaaagtccacacacagattgattacatacactg

SEQ ID NO: 675 - DNA, 60 bp, Artificial Sequence
  Probe
ttactagctgggtgacctgggtcaggtcaccttacttgtcatgtctctatcttcaaatga

SEQ ID NO: 676 - DNA, 60 bp, Artificial Sequence
  Probe
agtgtttggaggctgagggtacagaatagaaatgtgtgaactgcttgattcagaagacca

SEQ ID NO: 677 - DNA, 60 bp, Artificial Sequence
  Probe
aggttatgtaaaaaggctggggatgtgggagagtttgttatccaaattgcatggtggaaa

SEQ ID NO: 678 - DNA, 60 bp, Artificial Sequence
  Probe
tgaggaaacacttcaaagtggtaagacatttgcccgaggtcctgaaggaagagagtaaag

SEQ ID NO: 679 - DNA, 60 bp, Artificial Sequence
  Probe
agttggtctccttcctttctctttcctgctccgttgtagttttcatcattctctgctctg

SEQ ID NO: 680 - DNA, 60 bp, Artificial Sequence
  Probe
ccatcggaaccatctttgccatctatagaaagacctcagaggatgagccttctgaaaagg

SEQ ID NO: 681 - DNA, 60 bp, Artificial Sequence
  Probe
gtgaaaagcaacatggacatttccttctagtccttccaaggaggggagagaagtgtatgt

SEQ ID NO: 682 - DNA, 60 bp, Artificial Sequence
  Probe
taaagttatgggctgtacctgccccctttgcaatttggaaagcatggtttagaaactaca

SEQ ID NO: 683 - DNA, 60 bp, Artificial Sequence
  Probe
gctgcagctggagagaatcaacgtctactacaatgagtcatcgtctcagaaatatgtgcc

SEQ ID NO: 684 - DNA, 60 bp, Artificial Sequence
  Probe
tgtaaattatgcaacttcaaagcctgccctgttttgcagtgtattccatccttgaggagt

SEQ ID NO: 685 - DNA, 60 bp, Artificial Sequence
  Probe
ggttttttgagggggagcttctgattgctcctgcttagaaggcccttgaactaaaaatag

SEQ ID NO: 686 - DNA, 60 bp, Artificial Sequence
  Probe
attgcagaaccagatgcaagattcagtggcttctacagcatgcaaaaacagaaccatcta

SEQ ID NO: 687 - DNA, 60 bp, Artificial Sequence
  Probe
ttcatgtccaagtctctggaagagctacagattggcacctatgccaatattgctatggtt

SEQ ID NO: 688 - DNA, 60 bp, Artificial Sequence
  Probe
gtcagtgaacagttctcttccttcatttctccacctgtaagccaggtatgataaacgcca

SEQ ID NO: 689 - DNA, 60 bp, Artificial Sequence
  Probe
ggtatgtaaccagaccatagctttccctagtgtgcttatccaggagtcaactctaggtgt

SEQ ID NO: 690 - DNA, 60 bp, Artificial Sequence
  Probe
gctgaagttgcgtttaggaatctctcctcttcttatggctgatgctaccgtttagtcagg

SEQ ID NO: 691 - DNA, 60 bp, Artificial Sequence
  Probe
tgaggaagctgaggatgatggttttgatagtgatagctcactgtcagactcagaccttga

SEQ ID NO: 692 - DNA, 60 bp, Artificial Sequence
  Probe
gcatttcttgaagcccctgcaacggttcctgaaacctcaagacattgagatcatctttat

SEQ ID NO: 693 - DNA, 60 bp, Artificial Sequence
  Probe
tccaagatcttaaagccacggagaagcctctcatcttatggcattgacaaagagaagacc

SEQ ID NO: 694 - DNA, 60 bp, Artificial Sequence
  Probe
tcttggtgagataggatgtatccaagtgttcaatggtaagaggagagccaaggaggctta

SEQ ID NO: 695 - DNA, 60 bp, Artificial Sequence
  Probe
aaatgggacaagatggccatgacagaggagcaaaagttattgctacaggatttgctgatc

SEQ ID NO: 696 - DNA, 60 bp, Artificial Sequence
  Probe
agacatctgtttaaaccccacagtgtatgtctgtatgcatgtaccggtgggtacacaatt

SEQ ID NO: 697 - DNA, 60 bp, Artificial Sequence
  Probe
agaaatacgagaaacgaattgagcgcttaacgatcctgaaagaggaagatggagacgctg

SEQ ID NO: 698 - DNA, 60 bp, Artificial Sequence
  Probe
ctatcgatcttgccaaaggagtgattcagatgctgaggctcaaggaaaatcctcagaagt

SEQ ID NO: 699 - DNA, 60 bp, Artificial Sequence
  Probe
cctggtgcttctatcctaataccatcgacgtccctccagaagaggagtgtgaattttaga

SEQ ID NO: 700 - DNA, 60 bp, Artificial Sequence
  Probe
agagacaaaactagagcacaattctcctgatgttgtcccacaaagatatcacccctgagc

SEQ ID NO: 701 - DNA, 60 bp, Artificial Sequence
  Probe
tcttctccacgagttttaacaagcatgcgtacttttgtaagtggtgagtgtaacggaggt

SEQ ID NO: 702 - DNA, 60 bp, Artificial Sequence
  Probe
tctctactccatgtactcagcttccaaggtgagtgatgtcatgacttccaagtctcttcc

SEQ ID NO: 703 - DNA, 60 bp, Artificial Sequence
  Probe
gttctgaccctgcttcaaatatttccctcacctttcccatcttccaagggtactaaggaa

SEQ ID NO: 704 - DNA, 60 bp, Artificial Sequence
  Probe
tacatctgccaacctagttcaccttggttttgtgtctgctgtagaagggaaccataactt

SEQ ID NO: 705 - DNA, 60 bp, Artificial Sequence
  Probe
tcttaggactgtctcacatgttacaggacaccatgcttgtttcacatccactaactgctg

SEQ ID NO: 706 - DNA, 60 bp, Artificial Sequence
  Probe
gcacttaggtggtctttgaaacctgtcaggtttcacatctctgctttgagtgaaaagctc

SEQ ID NO: 707 - DNA, 60 bp, Artificial Sequence
  Probe
ccactgccaccactttctatgcagctactactgttccagaatcaaagaactttgccaaag

SEQ ID NO: 708 - DNA, 60 bp, Artificial Sequence
  Probe
gacagagggacttgaggctggaaggcagtttgatttgtagcaagaaaacttggtacaaag

SEQ ID NO: 709 - DNA, 60 bp, Artificial Sequence
  Probe
aaggaatcgattgccctaaaacatacctgttccactgttggccacttttgcaatagacaa

SEQ ID NO: 710 - DNA, 60 bp, Artificial Sequence
  Probe
ttcctaactccatgacagctcctcagtagagctttcctcctcagaagcaactagaacaat

SEQ ID NO: 711 - DNA, 60 bp, Artificial Sequence
  Probe
atatacctgtcagcgagagtttgctctgaaacacctgcctaatgaccccatgtttaagtt

SEQ ID NO: 712 - DNA, 60 bp, Artificial Sequence
  Probe
caccgtaagacctcattccatgtttgtccagtgcctttcagtgcattatcaaagggaatc

SEQ ID NO: 713 - DNA, 60 bp, Artificial Sequence
  Probe
tctagatgtcagccaaaggtctgtggtttgagactaattgagtctgcacacgataatggc

SEQ ID NO: 714 - DNA, 60 bp, Artificial Sequence
  Probe
caattaaaactgtaaggtggggaaggaggaggaaataagagaagcacctgaggcttgagt

SEQ ID NO: 715 - DNA, 60 bp, Artificial Sequence
  Probe
gacaatcactactggtacttggctaaatattgcagccacctcttcaggctacacatgtca

SEQ ID NO: 716 - DNA, 60 bp, Artificial Sequence
  Probe
tcctttggggaaagtcttaaaattgccactgtacaaatgaggaaagagaggcccaaaagg

SEQ ID NO: 717 - DNA, 60 bp, Artificial Sequence
  Probe
tgatttccactggattagcacctttgctaatcttctcgaagccttccttggctatagagc

SEQ ID NO: 718 - DNA, 60 bp, Artificial Sequence
  Probe
tactgagaaactccaaccatcagccttcagtaatgatagggcttcaaggttcacagcaaa

SEQ ID NO: 719 - DNA, 60 bp, Artificial Sequence
  Probe
gctaagtcgccttgagatggacaatggtggaaacttactgagctttccacctcaaatttg

SEQ ID NO: 720 - DNA, 60 bp, Artificial Sequence
  Probe
acactgcactgttaataactctcagcaggcaaagaccgattgcataggaattgcacaatc

SEQ ID NO: 721 - DNA, 60 bp, Artificial Sequence
  Probe
caggaagctgagattgacagcattcaccagttagttgtgggggcaactgaaaatatcaag

SEQ ID NO: 722 - DNA, 60 bp, Artificial Sequence
  Probe
gccctttgtgcatgttagttacagcatgtaccacattgcactgtattgttggtttttggg

SEQ ID NO: 723 - DNA, 60 bp, Artificial Sequence
  Probe
agaaaggggtctttgtgaactgtacaggctgtctaggatattcaccagatcacctcatct

SEQ ID NO: 724 - DNA, 60 bp, Artificial Sequence
  Probe
tatcctctacatccaatatgcatgggtcactgttacaagagaagcaccggattttgcaca

SEQ ID NO: 725 - DNA, 60 bp, Artificial Sequence
  Probe
gaaggaaggaaggaggacacatcagagctttgggaccttacagataatgaagttcaaccg

SEQ ID NO: 726 - DNA, 60 bp, Artificial Sequence
  Probe
ctgtgtttttgtgcatcgaatggcacagtttgacactgacaccttcctagacacacttac

SEQ ID NO: 727 - DNA, 60 bp, Artificial Sequence
  Probe
gaggcgtcattttcttccatgagaccctctaccagaaagatgataatggtgttcccttcg

SEQ ID NO: 728 - DNA, 60 bp, Artificial Sequence
  Probe
ccaaggatgctgcagaagctataaagaagcataatgttggcgtcaaatgtgccactatca

SEQ ID NO: 729 - DNA, 60 bp, Artificial Sequence
  Probe
tacactggcaactattcaagctcttgcttctggtggctctcttccaataacatcacttga

SEQ ID NO: 730 - DNA, 60 bp, Artificial Sequence
  Probe
ctcaccttcacttctcagggctttggttttcccattcgaaaatggaggctgttcttaatc

SEQ ID NO: 731 - DNA, 60 bp, Artificial Sequence
  Probe
aattagagggattagacctggcttcgacatctgacttgactccaacctaccaaaggatct

SEQ ID NO: 732 - DNA, 60 bp, Artificial Sequence
  Probe
ttgtcatctctggggctgtcatttgctatccaccatacttgtcttgttagacaagagcag

SEQ ID NO: 733 - DNA, 60 bp, Artificial Sequence
  Probe
tttccattgcaggcgtgccattttgtatttctagaagcagtatacaggggcttcagtttc

SEQ ID NO: 734 - DNA, 60 bp, Artificial Sequence
  Probe
cctctttctctgataacactgtcctctttctctgataacaccgtcctcccttccagatcc

SEQ ID NO: 735 - DNA, 60 bp, Artificial Sequence
  Probe
ttgtcaacaaagtcacccacttcccactattgcttgcacaaaccaattaaacccagtagt

SEQ ID NO: 736 - DNA, 60 bp, Artificial Sequence
  Probe
cggtcacaatagcagtttcgctttccattccattttatccagggtggttttatctccacc

SEQ ID NO: 737 - DNA, 60 bp, Artificial Sequence
  Probe
atcactgatgaggaatctaccagagttaaaatctcagcttgatgaggggagcctgtcaga

SEQ ID NO: 738 - DNA, 60 bp, Artificial Sequence
  Probe
gagaaaagtcacacaagatccaccaggcctcagacctctgattccacagtctcattttac

SEQ ID NO: 739 - DNA, 60 bp, Artificial Sequence
  Probe
tttgtggacaattgcaatcctgaatcctgcacatctgcttcacagttttccctttacaga

SEQ ID NO: 740 - DNA, 60 bp, Artificial Sequence
  Probe
tcttcagcctgactggaatttactgccggtgaacccctaatagagaatattatcccagga

SEQ ID NO: 741 - DNA, 60 bp, Artificial Sequence
  Probe
tttggagggacacaattcaacccatgacataggactatcaaggaatggatatgtcctgcc

SEQ ID NO: 742 - DNA, 60 bp, Artificial Sequence
  Probe
tcctgggataatattctctattaggggttcaccggcagtaaattccagtcaggctgaaga

SEQ ID NO: 743 - DNA, 60 bp, Artificial Sequence
  Probe
gctcatagtagtctattccttctagagcatgcactcttgtctcatcctcacacgtgctgt

SEQ ID NO: 744 - DNA, 60 bp, Artificial Sequence
  Probe
aggacatgtaagtggagttttccagcagggagaaaacgcagagctaaagctcatatcttt

SEQ ID NO: 745 - DNA, 60 bp, Artificial Sequence
  Probe
attaatggggctgcaggagaagtgagaaagagatcagctgtcattatggtcttccaagtg

SEQ ID NO: 746 - DNA, 60 bp, Artificial Sequence
  Probe
acaggttttgaagctgaaaagtcgatgtagagtggcaactgacttaagggacacagaagt

SEQ ID NO: 747 - DNA, 60 bp, Artificial Sequence
  Probe
ttggtatagtgggaacatttgctttggagacagatgaactggattctgatcgtgaccctg

SEQ ID NO: 748 - DNA, 60 bp, Artificial Sequence
  Probe
cctcctacaaatgatcatgttgtttgcatctgcctgattgagttcccttggtcaaacctc

SEQ ID NO: 749 - DNA, 60 bp, Artificial Sequence
  Probe
agtttgcttaaagagggccacctgccaaacagctgtagtatgtgatgttaaagagagcta

SEQ ID NO: 750 - DNA, 60 bp, Artificial Sequence
  Probe
ttctccttccctcctcttccttgttcacgctatagcagaatgtgacatactccttaccag

SEQ ID NO: 751 - DNA, 60 bp, Artificial Sequence
  Probe
actcaccaggaccttccacttccatttgttagatgtgaggtccttttactcagcatgttc

SEQ ID NO: 752 - DNA, 60 bp, Artificial Sequence
  Probe
gactctactttggcattggagttagtgtcaaagggaaggaatccagaaaccaccagtagg

SEQ ID NO: 753 - DNA, 60 bp, Artificial Sequence
  Probe
aagtttattgccaggcaactgagtaaggggagaggagtcacactcaagtttgactttctc

SEQ ID NO: 754 - DNA, 60 bp, Artificial Sequence
  Probe
gaacaaggaagaatgaagtttacccggcccttattcaaggatcttgctgcctttgacaaa

SEQ ID NO: 755 - DNA, 60 bp, Artificial Sequence
  Probe
cctatgccgaatgccctcaggggacttgaatctttccaataaaccaggtttagacagtat

SEQ ID NO: 756 - DNA, 60 bp, Artificial Sequence
  Probe
ctatatgtgtagtgtgtgtgggaaagcattcaggtttagcttccagctcagtcagcatca

SEQ ID NO: 757 - DNA, 60 bp, Artificial Sequence
  Probe
actgtataaagaggccacgtctaccttcaccaatatcacgtaccggggcacttaatgata

SEQ ID NO: 758 - DNA, 60 bp, Artificial Sequence
  Probe
ctctttaaaggctgagtcctattccattgtgtgggtgtctacccattgttggacacttga

SEQ ID NO: 759 - DNA, 60 bp, Artificial Sequence
  Probe
ccacaaaaccagggactttcatcttagcctaccgagaacaccaagcagaattagacaaga

SEQ ID NO: 760 - DNA, 60 bp, Artificial Sequence
  Probe
tgttgttgaagctatttctgggagcccagaagaaatgctcttttgcttggagtttgtcat

SEQ ID NO: 761 - DNA, 60 bp, Artificial Sequence
  Probe
cgttaagcagtacatcttgtgcatgcaaaaatgaattcacccctcccacctctttcttca

SEQ ID NO: 762 - DNA, 60 bp, Artificial Sequence
  Probe
tcttactagggaaagccatcagtactctgtggctgatcagccttttcttgcatgaaacaa

SEQ ID NO: 763 - DNA, 60 bp, Artificial Sequence
  Probe
aatcagacccaatcatgagagtatatctgctgtgtccccttgaagagaagactcagaccc

SEQ ID NO: 764 - DNA, 60 bp, Artificial Sequence
  Probe
aagtaacctcttacccaaaacttccagggatgctttacataatgccaggcctctgagaaa

SEQ ID NO: 765 - DNA, 60 bp, Artificial Sequence
  Probe
agggatgggttatgaaatcaaacttgtcagttgggatcctttatatcgggacccacacag

SEQ ID NO: 766 - DNA, 60 bp, Artificial Sequence
  Probe
gactccatcctacttttcttcccatgtattctttcctgcttgtaccagttcactggggtg

SEQ ID NO: 767 - DNA, 60 bp, Artificial Sequence
  Probe
acatttcctgctattactctcatggaaaggccatgatgctgtcaacaattgaccacaagc

SEQ ID NO: 768 - DNA, 60 bp, Artificial Sequence
  Probe
ggacattaactcttctagtacttcagaatgggcttgttcaagggctgagcaggtttcctt

SEQ ID NO: 769 - DNA, 60 bp, Artificial Sequence
  Probe
tagaagtaattttaagggctgaagctgtggaatcagctcaagctggtgacaagtgtgact

SEQ ID NO: 770 - DNA, 60 bp, Artificial Sequence
  Probe
atatctatctacccgacttcctgggctgtgtaactcggaaagtgatctctctagacacca

SEQ ID NO: 771 - DNA, 60 bp, Artificial Sequence
  Probe
aagtgacagaaacccaacttgcgttaaccacaaagcctcaaaggggaatttattggatca

SEQ ID NO: 772 - DNA, 60 bp, Artificial Sequence
  Probe
taactcatgcatttgagctctttttttgcttttgctctttgcgcatgggggatgtaaagg

SEQ ID NO: 773 - DNA, 60 bp, Artificial Sequence
  Probe
tctaggcatattggctatgattgacgaaggggaaaccgactggaaagtcattgccattaa

SEQ ID NO: 774 - DNA, 60 bp, Artificial Sequence
  Probe
gcctctgtcatgtcatctgattgtgcttgccccatagttagtgtactgtgaaaaagagga

SEQ ID NO: 775 - DNA, 60 bp, Artificial Sequence
  Probe
tggcctgctatgtggagaacgctctttccttactgtctcacttaatagaactcctgttct

SEQ ID NO: 776 - DNA, 60 bp, Artificial Sequence
  Probe
tttgcctctgtaagtatctccatattcctccatcctttcaggtcccattcagtccctagg

SEQ ID NO: 777 - DNA, 60 bp, Artificial Sequence
  Probe
ggggtcaggtgcacttttttaaaaagaagttctcttggtcacgtcctaaaagtgaccagc

SEQ ID NO: 778 - DNA, 60 bp, Artificial Sequence
  Probe
gtgtcacccccttttatgcagtcaaatgtaatgatagcaaagccatcgtgaagacccttg

SEQ ID NO: 779 - DNA, 60 bp, Artificial Sequence
  Probe
tgaaagctatggaattgctcttcagacgtgtgcacaggattttggaaacaatttctgggt

SEQ ID NO: 780 - DNA, 60 bp, Artificial Sequence
  Probe
ctgtcctagtaacaaaactcgcaaaaattgtcaccacagtggaagccaggtgcctttaat

SEQ ID NO: 781 - DNA, 60 bp, Artificial Sequence
  Probe
tgactaattcctttagcagggcagattagataaagccaaatgaattcctggctcacccct

SEQ ID NO: 782 - DNA, 60 bp, Artificial Sequence
  Probe
gttgaggaccagcatttagacctctgaatccagggaagacttttctttgtgtagctcagg

SEQ ID NO: 783 - DNA, 60 bp, Artificial Sequence
  Probe
atatttatgtggacccgatgcagctgccttatgactcaagatgggagtttccaagagatg

SEQ ID NO: 784 - DNA, 60 bp, Artificial Sequence
  Probe
tgctttacttcctgatgtcaaaatgagctgcatagcttcccctccttagaatggtcagtc

SEQ ID NO: 785 - DNA, 60 bp, Artificial Sequence
  Probe
actccagacctacaaaatcagaaactctggggttaaggtcggcatcatgtcttaacaagc

SEQ ID NO: 786 - DNA, 60 bp, Artificial Sequence
  Probe
atatgtctgctcacaggttcatccttaggcaggtgtatgcgtatgtttggaggaggtata

SEQ ID NO: 787 - DNA, 60 bp, Artificial Sequence
  Probe
cctgggtatgtacaccacagaaagctatgtccaccgagacattggcaagaatgtttctaa

SEQ ID NO: 788 - DNA, 60 bp, Artificial Sequence
  Probe
attgttagaagaggctcttctgtgagaaaggagcagcaaatgctaacagcctgtcttctt

SEQ ID NO: 789 - DNA, 60 bp, Artificial Sequence
  Probe
cacaatttggctcatctattcctgaatggaacagggggacaaacccatttgtctccaaat

SEQ ID NO: 790 - DNA, 60 bp, Artificial Sequence
  Probe
caccatccttcccttatggtggcatggagaatccttgccttacttttgtaactcctactc

SEQ ID NO: 791 - DNA, 60 bp, Artificial Sequence
  Probe
agtggagagcaactcaaatggcaggaagagtgaggaagagaacctttttgagatcatcac

SEQ ID NO: 792 - DNA, 60 bp, Artificial Sequence
  Probe
gaagtttacttatctgggtccttcaacaactggagtaaacttcccctcaccagaagccac

SEQ ID NO: 793 - DNA, 60 bp, Artificial Sequence
  Probe
cccaatgactttttcacattagctcacatttcaccccctgggtgagattcagaatttccc

SEQ ID NO: 794 - DNA, 60 bp, Artificial Sequence
  Probe
taagctgcttaggcttgaaacgtgctgtgttcttttaccagccttgattttactcttgcc

SEQ ID NO: 795 - DNA, 60 bp, Artificial Sequence
  Probe
gctttaaggattgtagtgggcgttttccaaggaggagggaattacttctaggatgctagc

SEQ ID NO: 796 - DNA, 60 bp, Artificial Sequence
  Probe
gaacattgcaacgttggttagggttgaggttgaaatacctggcactgccagaagataatt

SEQ ID NO: 797 - DNA, 60 bp, Artificial Sequence
  Probe
cattgttctagttgcttctgaggaggaaagctctactgaggagctgtcatggagttagga

SEQ ID NO: 798 - DNA, 60 bp, Artificial Sequence
  Probe
cccttacaaacatacacagcactctgcagggctccaatcgaacaaatagaagactgagaa

SEQ ID NO: 799 - DNA, 60 bp, Artificial Sequence
  Probe
tgcatttggacttccaacctccacaggactccatcacacattactgtcacatcagattac

SEQ ID NO: 800 - DNA, 60 bp, Artificial Sequence
  Probe
gcagggaagctttgcatgttgctctaaggtacatttttaaagagttgttttttggccggg

SEQ ID NO: 801 - DNA, 60 bp, Artificial Sequence
  Probe
gccatatccacacttagttctttgccagacttgttctgtgtttccagtagctagagggtg

SEQ ID NO: 802 - DNA, 60 bp, Artificial Sequence
  Probe
ccctctgcctggaattttcttttgggcttatcctcattccctttcattcatccttccaac

SEQ ID NO: 803 - DNA, 60 bp, Artificial Sequence
  Probe
ccaaagggaaaatgaaggaagtaaaacagcttgtggctaacttgcgtggggaatccttat

SEQ ID NO: 804 - DNA, 60 bp, Artificial Sequence
  Probe
acagagaactggtctctcatttgtctcatcctgttctttctagcagccacgactttccta

SEQ ID NO: 805 - DNA, 60 bp, Artificial Sequence
  Probe
gagggtagaaggcaaaccctaacattttttcctgctgtcaccctccatcttagatgactc

SEQ ID NO: 806 - DNA, 60 bp, Artificial Sequence
  Probe
acttgtcctcctagcagattttgtcctggagttcagatttgaatacctgtggccattctg

SEQ ID NO: 807 - DNA, 60 bp, Artificial Sequence
  Probe
atatcaaaagaagcatggccaacagtgccagaaatggcatccagtgtcttgtgtttatga

SEQ ID NO: 808 - DNA, 60 bp, Artificial Sequence
  Probe
gacactcaatttgggaagctgtgtgatcgccacaaaccttcaggaaatacgaaatggatt

SEQ ID NO: 809 - DNA, 60 bp, Artificial Sequence
  Probe
gagacctaatagagatgcatgtttattgtggcaactttggaaggagggtgtcttgggtga

SEQ ID NO: 810 - DNA, 60 bp, Artificial Sequence
  Probe
tactctccatcccagacgtggtcatggtactcatttaaaagcagcaccagagtatagacc

SEQ ID NO: 811 - DNA, 60 bp, Artificial Sequence
  Probe
ctgggacttaggcttctgttaatatggcccttggtttcttagcttttgggactaccaagt

SEQ ID NO: 812 - DNA, 60 bp, Artificial Sequence
  Probe
gagatgggtgtacacaatttacaggtagagtgaatgcaaaggtcctggggtagacgtttg

SEQ ID NO: 813 - DNA, 60 bp, Artificial Sequence
  Probe
aagcttttgcattcaggggaatgactttgggtttgggtgaggattgtaaagaggcaatat

SEQ ID NO: 814 - DNA, 60 bp, Artificial Sequence
  Probe
gctttttccagaatcgattttgcaagcttcaagattctgttcccctcttcgcagaagtga

SEQ ID NO: 815 - DNA, 60 bp, Artificial Sequence
  Probe
tctgaaatactgggtagagaatggctgaggaggagattaccagagaagttgctttgctca

SEQ ID NO: 816 - DNA, 60 bp, Artificial Sequence
  Probe
cagattcccttatggcatatcatctccaggttaactctggatctgggttcctgcctctat

SEQ ID NO: 817 - DNA, 60 bp, Artificial Sequence
  Probe
caggacaccgatgcaaaccaaaataaactgttgcctctgaacacacaaaacaaaaccctg

SEQ ID NO: 818 - DNA, 60 bp, Artificial Sequence
  Probe
aaacctaaagttgtgaatggcggaagcacaaatttcccaagtggatcatggagagtgatg

SEQ ID NO: 819 - DNA, 60 bp, Artificial Sequence
  Probe
tgaaggcttgactggggacagagcatccatttccaagttcactcatatagttgttggaaa

SEQ ID NO: 820 - DNA, 60 bp, Artificial Sequence
  Probe
aggatcaaaagccaatctggaaagttgaggtcaaactctctgtgaaatctgggaagggat

SEQ ID NO: 821 - DNA, 60 bp, Artificial Sequence
  Probe
ctcgaacctctgttaaagctgaaagaagaagtcagtcttctgctgggcacactgttagtg

SEQ ID NO: 822 - DNA, 60 bp, Artificial Sequence
  Probe
atggcaatgcagccattgtgtgtcaacagttgtagcaatacctatagcatttgggacatt

SEQ ID NO: 823 - DNA, 60 bp, Artificial Sequence
  Probe
tctcctgagctttaggtttgaaagcccaaaacacacaaaacccacagtgtttaactggtt

SEQ ID NO: 824 - DNA, 60 bp, Artificial Sequence
  Probe
accattgagggttttaatgtagccggtcttcttcccagcttcataattgactccacttgt

SEQ ID NO: 825 - DNA, 60 bp, Artificial Sequence
  Probe
cgctctatagccaaggaaggcttcgagaagattagcaaaggtgctaatccagtggaaatc

SEQ ID NO: 826 - DNA, 60 bp, Artificial Sequence
  Probe
aaacatcttcagtgcaatccattgtgtgtggtctgggatgacaagggaagagatactctg

SEQ ID NO: 827 - DNA, 60 bp, Artificial Sequence
  Probe
cggcagtgtctggagacatttttggttgttaccactaggtagtgctattggcatctagtg

SEQ ID NO: 828 - DNA, 60 bp, Artificial Sequence
  Probe
cgagtgttcataggagagtttgcttacacttacgctgccatgtatgacaaaggacccttc

SEQ ID NO: 829 - DNA, 60 bp, Artificial Sequence
  Probe
gtctctcctggctctgagttctatcttccattaaggttcttcctgttcctcccctcattc

SEQ ID NO: 830 - DNA, 60 bp, Artificial Sequence
  Probe
cctgtaaagtgccttacagggtaactgtgctgaatgctttagatgaggaaatgatcccca

SEQ ID NO: 831 - DNA, 60 bp, Artificial Sequence
  Probe
ggaacttctatatggctttttcctttttccgtgtggctgcaatcctacagggagtctaca

SEQ ID NO: 832 - DNA, 60 bp, Artificial Sequence
  Probe
atacaagccagaggaaatcctgaagaggcacggaatgatttcctgaagagacaaaagacg

SEQ ID NO: 833 - DNA, 60 bp, Artificial Sequence
  Probe
caacattgcacaattcaaaattctaggcaccattgttttgtgcaccagctcagtcacgtt

SEQ ID NO: 834 - DNA, 60 bp, Artificial Sequence
  Probe
ttctgcaatttctcccaatctcacagagctctgctatcctgtaacaatctgtttacgccc

SEQ ID NO: 835 - DNA, 60 bp, Artificial Sequence
  Probe
atttatgtaaccagtatttgcaacccacactgccccctgttgtcataggtccgttttttg

SEQ ID NO: 836 - DNA, 60 bp, Artificial Sequence
  Probe
actgccagattaacagatatggccactttcaagccaccatcacaattgtagagggaatct

SEQ ID NO: 837 - DNA, 60 bp, Artificial Sequence
  Probe
gtgactgctgacaaagatggtgtggccgatgtgtctattgaagattctgtgatctcactc

SEQ ID NO: 838 - DNA, 60 bp, Artificial Sequence
  Probe
cagaatactgacgtctataggagtgggacccctccctggtgtcactgctgtaaaatttta

SEQ ID NO: 839 - DNA, 60 bp, Artificial Sequence
  Probe
tctggtttgagactggaaccaccaggattttgatgctggtaaggatgtctaaaatggagg

SEQ ID NO: 840 - DNA, 60 bp, Artificial Sequence
  Probe
ttttacgaccctacagggtatcaagatactgtgcagctcgccaacaaggattaattgcaa

SEQ ID NO: 841 - DNA, 60 bp, Artificial Sequence
  Probe
ttttgccacattttttttcccctggtgagctgagaaactgatggacgaagtgttctgatt

SEQ ID NO: 842 - DNA, 60 bp, Artificial Sequence
  Probe
ccccagtacacagattgtcttcagtatcttcccactgaccctccagtacatattctgcat

SEQ ID NO: 843 - DNA, 60 bp, Artificial Sequence
  Probe
tcactttggagacaccccctgtgtcttctagatgtcagactttccaaatctgtctgctat

SEQ ID NO: 844 - DNA, 60 bp, Artificial Sequence
  Probe
tctgggggtgagatgaccattctgggtctaagactgtttcaaagaagagctcatagactg

SEQ ID NO: 845 - DNA, 60 bp, Artificial Sequence
  Probe
ttccaagccaatcaatcagccagttcctagcagagtcagcacatgaacaagatctaagtc

SEQ ID NO: 846 - DNA, 60 bp, Artificial Sequence
  Probe
ggccaatgagatcattgtgaaggcaggggaatgtatgtgcacatctgttttgtaactgtt

SEQ ID NO: 847 - DNA, 60 bp, Artificial Sequence
  Probe
actgagcgaggagcaattgattaatagctcggcgaggggactcactgactgttataataa

SEQ ID NO: 848 - DNA, 60 bp, Artificial Sequence
  Probe
atcctttggtgaaaactgagacacaaaatggctgcaaataagcccaagggtcagaattct

SEQ ID NO: 849 - DNA, 60 bp, Artificial Sequence
  Probe
aaggatgaggtcttctccaagtactacactcctgtgctggctaaagctgttgatggatat

SEQ ID NO: 850 - DNA, 60 bp, Artificial Sequence
  Probe
tctctgaattgcagggtcttatttccctccaagatgaggcaaattcatgcctttcctgta

SEQ ID NO: 851 - DNA, 60 bp, Artificial Sequence
  Probe
actgttgagttcaggacacaccacgtgtagctgtgatccaggataagaagctacttctac

SEQ ID NO: 852 - DNA, 60 bp, Artificial Sequence
  Probe
gccagccctacaaaaataggaggtataagaatgttgcaggcagaagaacagcaaatgcaa

SEQ ID NO: 853 - DNA, 60 bp, Artificial Sequence
  Probe
taactatgttggactatgacatggtgcactttcctccttctcaaattgcagcaggagctt

SEQ ID NO: 854 - DNA, 60 bp, Artificial Sequence
  Probe
ttcctggaggttctaggtgaaaatgtgtttctttgccatttctagcttctagaggccacc

SEQ ID NO: 855 - DNA, 60 bp, Artificial Sequence
  Probe
ccttgacaagatcaaggcaacctcagaatagaggttgctgatgagaacctggaatgagtg

SEQ ID NO: 856 - DNA, 60 bp, Artificial Sequence
  Probe
ctagagcgaaaagccttaggaccgcttgttttagacggctggggaatatttattccttgt

SEQ ID NO: 857 - DNA, 60 bp, Artificial Sequence
  Probe
agaatgagtgctcctaaactcctctctctgggctgtatcttcttccccttgctacttttt

SEQ ID NO: 858 - DNA, 60 bp, Artificial Sequence
  Probe
tcatggaatggttctgcttatgatactctgcacgctgccttttagtgagtgaggagtttg

SEQ ID NO: 859 - DNA, 60 bp, Artificial Sequence
  Probe
tcttattgcctcagcccttgcccagattccacagaaggttttatggagatacaaaggaaa

SEQ ID NO: 860 - DNA, 60 bp, Artificial Sequence
  Probe
agcgtcaacttcaaaagtcgttcgttggttgtcataccacaaacatttactgcacgacac

SEQ ID NO: 861 - DNA, 60 bp, Artificial Sequence
  Probe
agttcgtgattccctcctcttttctgaaatgctttcttcacttgctggtgaccattctct

SEQ ID NO: 862 - DNA, 60 bp, Artificial Sequence
  Probe
ttgggaaagggcctttcccaagtagcagaaacaagattttcaaagactcataggtcagga

SEQ ID NO: 863 - DNA, 60 bp, Artificial Sequence
  Probe
tgctttgagagtatgtgtcctctgggacaagtggaatgaaagagaggatagaggcaaaga

SEQ ID NO: 864 - DNA, 60 bp, Artificial Sequence
  Probe
ttcatgcttcattaaggcaggcattgcaaactagttcagaggagagaatccacgatgaca

SEQ ID NO: 865 - DNA, 60 bp, Artificial Sequence
  Probe
aattggtaggttcgaggcacagaaaggtcaggcatctgtagtatggtgagtaagaactga

SEQ ID NO: 866 - DNA, 60 bp, Artificial Sequence
  Probe
taagtgtcaaggtgagaaagcctcacattctctcaagacagttgctctaggagctgagtt

SEQ ID NO: 867 - DNA, 60 bp, Artificial Sequence
  Probe
aaacaggttcttggagtgctgagacagcacctggggtacataaaagataattccggaaaa

SEQ ID NO: 868 - DNA, 60 bp, Artificial Sequence
  Probe
ttgtccagcaccaccacaaattgacaatggaataattcaaggggaacgtgaccattatgg

SEQ ID NO: 869 - DNA, 60 bp, Artificial Sequence
  Probe
gctttttctacacttacacttgcctggtagttttggagggggagaaaacattgcaatccg

SEQ ID NO: 870 - DNA, 60 bp, Artificial Sequence
  Probe
gttcctagtcactccatgagcaagtcactttatgtgccttgaagcctatttcaccttggt

SEQ ID NO: 871 - DNA, 60 bp, Artificial Sequence
  Probe
aggcatgaaaacaggaatgtttgttctcatttagggtcatgggttttcaggcttgagtgg

SEQ ID NO: 872 - DNA, 60 bp, Artificial Sequence
  Probe
ccctatactgtagtattctttggggtgcccctctccttcttagctatcattgcttcctcc

SEQ ID NO: 873 - DNA, 60 bp, Artificial Sequence
  Probe
ccacaaggtcacagcaggggagggagggacaattttataatgaaccaaaaattccatgtg

SEQ ID NO: 874 - DNA, 60 bp, Artificial Sequence
  Probe
ggacggagatatttacgagaaaaagaagcagtcattactcctgttgcatcagccacccaa

SEQ ID NO: 875 - DNA, 60 bp, Artificial Sequence
  Probe
gtaacctgacactctcaggagacattaagatagaaggggctgttcttcagtggttcccat

SEQ ID NO: 876 - DNA, 60 bp, Artificial Sequence
  Probe
gagtgcagagactgagaaagagatggccaccatgaaggaagaattccagaaaaccaaaga

SEQ ID NO: 877 - DNA, 60 bp, Artificial Sequence
  Probe
acctctctccttggtcctggaacagcgctactgatcaccaagtagccacaaaatataata

SEQ ID NO: 878 - DNA, 60 bp, Artificial Sequence
  Probe
gagttatctaagcaatcagatgttacagggccagccctttagctgctgtggtgtattctg

SEQ ID NO: 879 - DNA, 60 bp, Artificial Sequence
  Probe
cggtgatggataaaatcacatctgtgaagcatggtgggacactccataatacccctcaag

SEQ ID NO: 880 - DNA, 60 bp, Artificial Sequence
  Probe
tggcatgtcagacagaacttgaatgtgtcaggtgaccctgatgaaaacatagcatctcag

SEQ ID NO: 881 - DNA, 60 bp, Artificial Sequence
  Probe
agtcctgacctttgttgcgttccagatagatacttgcatcagcctcctaactacagtctc

SEQ ID NO: 882 - DNA, 60 bp, Artificial Sequence
  Probe
atgagtgtgggatttgaccagtataagtgcgattgtacccggacaggattctatggagaa

SEQ ID NO: 883 - DNA, 60 bp, Artificial Sequence
  Probe
ctgcaggaaaagtgcagtcatttctggaaagggaaatgagggggtttgttctcttcattc

SEQ ID NO: 884 - DNA, 60 bp, Artificial Sequence
  Probe
ctgcgttgcgtttgtttacagaccacgcaaggagttcatcccaaaatgatcagtaatctg

SEQ ID NO: 885 - DNA, 60 bp, Artificial Sequence
  Probe
ctccttcatcgaatgctaaacctttgagtagagtctccctggatcacataccaggtcagg

SEQ ID NO: 886 - DNA, 60 bp, Artificial Sequence
  Probe
aagtgttaatgcccaagtgactgacatcaactccaagggattggaattgaggaagactgt

SEQ ID NO: 887 - DNA, 60 bp, Artificial Sequence
  Probe
agttaaagcagtgcttctcaaaccttgatgtgcctgtgaatcacctaggggtcttgttaa

SEQ ID NO: 888 - DNA, 60 bp, Artificial Sequence
  Probe
attaccctcctcttacttggtgctgtcttacctcatcagtgaatgatgtcaccgttcagt

SEQ ID NO: 889 - DNA, 60 bp, Artificial Sequence
  Probe
ccagacacacattaccaaaatctggcagggtagtaaagtgccttgttgtccttacctctt

SEQ ID NO: 890 - DNA, 60 bp, Artificial Sequence
  Probe
tttctggcccaatttctacctacattcctcaccctaattccacttgccaaatcctctcac

SEQ ID NO: 891 - DNA, 60 bp, Artificial Sequence
  Probe
tgttgaatacagcacctactgaaagaactttcattccctgaccatgaacagcctctcagc

SEQ ID NO: 892 - DNA, 60 bp, Artificial Sequence
  Probe
gtgcaacagtgagtgaatgcaaccaatgtgactggaagaagttgactaggtagagggatc

SEQ ID NO: 893 - DNA, 60 bp, Artificial Sequence
  Probe
ttctaatggttgagcctcagagtacatatttggggtgcggtttggtttgctttgtagagt

SEQ ID NO: 894 - DNA, 60 bp, Artificial Sequence
  Probe
agtccttggggttaagtctcctgtcttatggtccagaaactcctgtttctccttagttgg

SEQ ID NO: 895 - DNA, 60 bp, Artificial Sequence
  Probe
gaagctgtgagggaagatctagatatgaggcctccttcctatgaatacgtagtgggagga

SEQ ID NO: 896 - DNA, 60 bp, Artificial Sequence
  Probe
ttggggaaaacttagaatactgtccctttcctcctgatcctgaggttttgaggtaaggga

SEQ ID NO: 897 - DNA, 60 bp, Artificial Sequence
  Probe
gtcgctgagcttcctagatagaaaccaaagcagtgcaagattcagttcaaggtcctgaaa

SEQ ID NO: 898 - DNA, 60 bp, Artificial Sequence
  Probe
cttccatgatcttcagtttcctcacgtggaacatggagttgattactgcctttcctccag

SEQ ID NO: 899 - DNA, 60 bp, Artificial Sequence
  Probe
ccagagttcttaacacacataaactgcctggtcctaaaagagtgctgcagaaacagctct

SEQ ID NO: 900 - DNA, 60 bp, Artificial Sequence
  Probe
gggtcaattctcaaaggaaatgacatcacctcatctgagatccaaaggccaagtagggac

SEQ ID NO: 901 - DNA, 60 bp, Artificial Sequence
  Probe
gataaaaccatacggatgtcaaaactgtcttcttgtgctgagtcagttcctcgatggggg

SEQ ID NO: 902 - DNA, 60 bp, Artificial Sequence
  Probe
tcgatctgaccagtttagcaacctcagtgaaaagaaaacacctctttgccagaaggttca

SEQ ID NO: 903 - DNA, 60 bp, Artificial Sequence
  Probe
ctgcatgttactgccaccacaaacatctctgttgttcctcatcgtacattcctcagagtc

SEQ ID NO: 904 - DNA, 60 bp, Artificial Sequence
  Probe
gtctcaggaagtggtttaggatgtttcagcgagagcatgatacagactaacccaggaaga

SEQ ID NO: 905 - DNA, 60 bp, Artificial Sequence
  Probe
caacctttaggatggacaggttgcccttgtgatgtcagcaaacccttgaccagtatataa

SEQ ID NO: 906 - DNA, 60 bp, Artificial Sequence
  Probe
ggtcgtcaagagaactgtgtcattccaaactcaccaaggtggcttatagaacagaagcag

SEQ ID NO: 907 - DNA, 60 bp, Artificial Sequence
  Probe
gtaaactagagagagcagcaaaaacaccagtcttgcctgagtctttctccagcatttcca

SEQ ID NO: 908 - DNA, 60 bp, Artificial Sequence
  Probe
aaaatgagctagaacagggaaagctgagaaaacaggagtccagtttagcggctactgttg

SEQ ID NO: 909 - DNA, 60 bp, Artificial Sequence
  Probe
attctttcccaaaggtcccttcttgagatacatgtgtttctcagaagccaggcatgtcaa

SEQ ID NO: 910 - DNA, 60 bp, Artificial Sequence
  Probe
gagtgggaagacctgactttatgggggtattgattgtggatcatcgactgtgtgtgtttg

SEQ ID NO: 911 - DNA, 60 bp, Artificial Sequence
  Probe
atagctcatacacacccagaatgttacttacatgtccctccatgttacaccaagacccct

SEQ ID NO: 912 - DNA, 60 bp, Artificial Sequence
  Probe
cagggaggtgacgggtctgtcatgcttctatccctgtttcaccctctttattttttttga

SEQ ID NO: 913 - DNA, 60 bp, Artificial Sequence
  Probe
ggcgttaacaagcaatcagggtacagggtgttcagaatcaaggatgagcacaataagaga

SEQ ID NO: 914 - DNA, 60 bp, Artificial Sequence
  Probe
tccaagacccaggagcagactataattgaagccagttgtctaatcccactgagaatcaca

SEQ ID NO: 915 - DNA, 60 bp, Artificial Sequence
  Probe
catttgtttgtacaagatccgcagacgtgtaaatgttcctgcaaaaacacagactcgcgt

SEQ ID NO: 916 - DNA, 60 bp, Artificial Sequence
  Probe
gaggagcaaccagggttttatgcacatgaaactggccaaaaccaaagagaaatacgttct

SEQ ID NO: 917 - DNA, 60 bp, Artificial Sequence
  Probe
ccctcttgaatgagtcatttaaagtcacatttgcagacagttttgggtgggcagtgatgg

SEQ ID NO: 918 - DNA, 60 bp, Artificial Sequence
  Probe
ttgaatcaagttgatgtgggttccgaactgtatctcttccggctgaggacagagaagtat

SEQ ID NO: 919 - DNA, 60 bp, Artificial Sequence
  Probe
ccaaactgaagatgccttctcagtcagttgagcagacctactccaatgaagtccattgtg

SEQ ID NO: 920 - DNA, 60 bp, Artificial Sequence
  Probe
cagcactgtctcagtttcactttcacatagatgtccctttcttggccagttatcccttcc

SEQ ID NO: 921 - DNA, 60 bp, Artificial Sequence
  Probe
tctcagagcatccagttaggggtgtgcaagtttactttgttactggctgatgttgtgaag

SEQ ID NO: 922 - DNA, 60 bp, Artificial Sequence
  Probe
ttctttccattctgcatcacagcacagagccatcccatctgctcacatgattagaatcat

SEQ ID NO: 923 - DNA, 60 bp, Artificial Sequence
  Probe
ggtcctcatagatttctttgaggatactgagcgctacagaaaacaagccaacaaagccct

SEQ ID NO: 924 - DNA, 60 bp, Artificial Sequence
  Probe
tccttgagaacatcaagaggaaagtgaccagtgtgtccaccctgaagagtgaagacataa

SEQ ID NO: 925 - DNA, 60 bp, Artificial Sequence
  Probe
agagtttgacctcattagtatggtgctttgggtgaggacctcttccttgattatcccact

SEQ ID NO: 926 - DNA, 60 bp, Artificial Sequence
  Probe
gcatgaacatttcccagactttcatgaagctgttgaggtcctaggcaattaatgcagcag

SEQ ID NO: 927 - DNA, 60 bp, Artificial Sequence
  Probe
agaaaaatatttctcaggccccaagcccaaagctgtgctaaaccaattccgaacagattt

SEQ ID NO: 928 - DNA, 60 bp, Artificial Sequence
  Probe
ggcaaagctgaaatttgaagccagattagcctaacctcaaagcctgtgcctatgttatgg

SEQ ID NO: 929 - DNA, 60 bp, Artificial Sequence
  Probe
gccactgttggcatgtacaatggcgattatgttctgtacctgtaacggctatttgcaaag

SEQ ID NO: 930 - DNA, 60 bp, Artificial Sequence
  Probe
ttgtactacttccaccactacatcattcttgaacatgacagctggtgcctagcattgcac

SEQ ID NO: 931 - DNA, 60 bp, Artificial Sequence
  Probe
agggcttttagggagagtgactcatagtccatgagcctatcttcactttgattcacccag

SEQ ID NO: 932 - DNA, 60 bp, Artificial Sequence
  Probe
gatccagacaggactaggtcagcccagttgttgtctgaacaggctatcctataggaaatg

SEQ ID NO: 933 - DNA, 60 bp, Artificial Sequence
  Probe
aaacgacaagaagctttagcagctgctcgactgaaaatgcaagaagaactaaatgcgcaa

SEQ ID NO: 934 - DNA, 60 bp, Artificial Sequence
  Probe
acaaagggaggggaatggttatcagaattcagagaggaaagttggtgtggagagagctat

SEQ ID NO: 935 - DNA, 60 bp, Artificial Sequence
  Probe
ccttggatgacaggcaccataacccttaacccacttggtaatctctcatttttggtctgt

SEQ ID NO: 936 - DNA, 60 bp, Artificial Sequence
  Probe
gtctgaaatcgaagctctagtgggactggcacacattcagccaagtctaatgaaacgaag

SEQ ID NO: 937 - DNA, 60 bp, Artificial Sequence
  Probe
ggttttggaccgggcactacactaccgaattatggctaactttggtttgtgatctagacc

SEQ ID NO: 938 - DNA, 60 bp, Artificial Sequence
  Probe
ctggaagagaatattctccccaaactgccctacctgactaccttgtcatgatcctccttc

SEQ ID NO: 939 - DNA, 60 bp, Artificial Sequence
  Probe
ggcccttcttcccacagcaatagtccccaatacgtagatttttgctcttctgtatgtgac

SEQ ID NO: 940 - DNA, 60 bp, Artificial Sequence
  Probe
gagtccctgcttcagaatcttattcctgaaaggtttccatctttctcccgttgcttctgg

SEQ ID NO: 941 - DNA, 60 bp, Artificial Sequence
  Probe
gaaaccagaaatcaggtgccgtgtcttcattctgcattttcttgaacaacccagagttcc

SEQ ID NO: 942 - DNA, 60 bp, Artificial Sequence
  Probe
agtcagtagacaaatcactgaagtccatgtctggcagttctcaatgtcatggggactgta

SEQ ID NO: 943 - DNA, 60 bp, Artificial Sequence
  Probe
gcagtgtgaagaagcttggtgtatacctgtgcaggcactagtcctttacagatgacaatg

SEQ ID NO: 944 - DNA, 60 bp, Artificial Sequence
  Probe
gttcctggggacaaagcttctttgaagggtcttttcagaaaatccccgctaaacgaattg

SEQ ID NO: 945 - DNA, 60 bp, Artificial Sequence
  Probe
ctccctactacgataatgtccgtccactctgctacagcgactcggatgcagtattactat

SEQ ID NO: 946 - DNA, 60 bp, Artificial Sequence
  Probe
atctaagtcatatggggaagggagttctttgcagtgagctgtttcccagaacacaaaagg

SEQ ID NO: 947 - DNA, 60 bp, Artificial Sequence
  Probe
tcctggtgggagaggcagataaaagatctgcagaaaaacaggagttcaggaggattaaga

SEQ ID NO: 948 - DNA, 60 bp, Artificial Sequence
  Probe
gcaacagtaagtcacaagttgacttggctggctcagtgtatatcccagtttctctccaac

SEQ ID NO: 949 - DNA, 60 bp, Artificial Sequence
  Probe
ttctgccttttagctaaattccccttgattggccctttctccagatattgagcagggaat

SEQ ID NO: 950 - DNA, 60 bp, Artificial Sequence
  Probe
tacacacacagactgaaattgtggtaagagttctgaggaaacaaagcaggagagcatgcc

SEQ ID NO: 951 - DNA, 60 bp, Artificial Sequence
  Probe
tgcagggtaagaggttgtaccacatcttggatagaaaatggccaggaactagaagaggaa

SEQ ID NO: 952 - DNA, 60 bp, Artificial Sequence
  Probe
tttggaaaactgttctgggcaacagtttgtgtttggtaccatctgttcttgacgctcaag

SEQ ID NO: 953 - DNA, 60 bp, Artificial Sequence
  Probe
ttgaatggagtcattttggcttcttcactggcacctctctgaatttctaggaatgtgcct

SEQ ID NO: 954 - DNA, 60 bp, Artificial Sequence
  Probe
caggagcaagccaaatccccaggatagatgcatccttttttcttcagacttggagtgtat

SEQ ID NO: 955 - DNA, 60 bp, Artificial Sequence
  Probe
acatagaagttcctgaagggtatgggattcacctctacttcacccatctggacattgagc

SEQ ID NO: 956 - DNA, 60 bp, Artificial Sequence
  Probe
cacactcacacctctattcacagaccagcatctcctctccttatcaggaacattccttcc

SEQ ID NO: 957 - DNA, 60 bp, Artificial Sequence
  Probe
cagtacaaagggtttatcaggccccctatcattccagagtttcagtgctgttccagaatg

SEQ ID NO: 958 - DNA, 60 bp, Artificial Sequence
  Probe
tccattggtaatgtctggcatgagtagagagagtggagtcatcaaaaggatgtaggccag

SEQ ID NO: 959 - DNA, 60 bp, Artificial Sequence
  Probe
aatcagtgcttattttaggaaacaggttgccccccacaactggggtaaaagaagagagaa

SEQ ID NO: 960 - DNA, 60 bp, Artificial Sequence
  Probe
gatggaaggacacctgactttggaaagagggacatcattctttcctgccagacattttct

SEQ ID NO: 961 - DNA, 60 bp, Artificial Sequence
  Probe
gctatgaggattgcagcagtgtttttctattcttctcctgttcccacgagctgtgatctg

SEQ ID NO: 962 - DNA, 60 bp, Artificial Sequence
  Probe
aaatactgcccacaggttttggtcttctcccattttcctctccttttccctctttgtagg

SEQ ID NO: 963 - DNA, 60 bp, Artificial Sequence
  Probe
aagcggcactagggaaaaagagggaagcacaataactccaaatgagtagtcacaaggttt

SEQ ID NO: 964 - DNA, 60 bp, Artificial Sequence
  Probe
catggaacctggagaggggagttagctgatgagattaatgtctgatagcctcaagctctg

SEQ ID NO: 965 - DNA, 60 bp, Artificial Sequence
  Probe
caacggatacgtcatcagtaaccaccccacgggtttactgtgatgctgcacaattattaa

SEQ ID NO: 966 - DNA, 60 bp, Artificial Sequence
  Probe
ctaaaatcagaggaacaatgaggtatccccttgacctggtatggttatcaggccctgagt

SEQ ID NO: 967 - DNA, 60 bp, Artificial Sequence
  Probe
actggatgtgctatccaattccctggtgatcaacatggtccaatcctcctatagtacctg

SEQ ID NO: 968 - DNA, 60 bp, Artificial Sequence
  Probe
tcttgggaaatatttgggcattggtctggccaagtctacaatgtcccaatatcaaggaca

SEQ ID NO: 969 - DNA, 60 bp, Artificial Sequence
  Probe
tgaaacattgctcgtgttcacttgcacatgagattgaaacaaccaccaaaagctggtaca

SEQ ID NO: 970 - DNA, 60 bp, Artificial Sequence
  Probe
tgaagacttgaattagattacagcgatggggacacagaaggtcaccccagctctgatatt

SEQ ID NO: 971 - DNA, 60 bp, Artificial Sequence
  Probe
gattcagagaaacccagaaatcagtcacctgctcaacaacccagacataatgaggcagac

SEQ ID NO: 972 - DNA, 60 bp, Artificial Sequence
  Probe
agagaagaggccagaaatgggagtttctcaaccatttatgcgacaagtcttcaggtgttg

SEQ ID NO: 973 - DNA, 60 bp, Artificial Sequence
  Probe
cctctgctagccgtcttcctctgctgatgagtgatttctgtttgatgcaaactttagctt

SEQ ID NO: 974 - DNA, 60 bp, Artificial Sequence
  Probe
gtgcttcgaggttttctgattttgaagaatcccagtcagtcaggttctggcgtaaagtga

SEQ ID NO: 975 - DNA, 60 bp, Artificial Sequence
  Probe
gctcactcccaaaaaagatttctcgcctcattacgtcccagacaactacaagaggaatgg

SEQ ID NO: 976 - DNA, 60 bp, Artificial Sequence
  Probe
gagtattactagagctttgccacctctccatttttgccttggtgctcatcttaatggcct

SEQ ID NO: 977 - DNA, 60 bp, Artificial Sequence
  Probe
agcttttattcatgctacttgtcagtctccctcagggttccttaggctgtccttgagtac

SEQ ID NO: 978 - DNA, 60 bp, Artificial Sequence
  Probe
ggaggagctgagagttggcaaatcaatagtttagctatgttgctgaaccttcctggatgg

SEQ ID NO: 979 - DNA, 60 bp, Artificial Sequence
  Probe
aaggtcaatgggacgatcacttcagtgagcagatagctctgtaaattcctccatagaggc

SEQ ID NO: 980 - DNA, 60 bp, Artificial Sequence
  Probe
cacatttgcctttgagctccgagataaaggcaaatttggttttctccttccagaatcccg

SEQ ID NO: 981 - DNA, 60 bp, Artificial Sequence
  Probe
attctgaggttgcatccaattttagcaggaaagagtgctgtgatcgttagctgcatcaga

SEQ ID NO: 982 - DNA, 60 bp, Artificial Sequence
  Probe
gctaacaggattagcccaggtgctggtggaagaaaggaggaactattgaaaggtttgaat

SEQ ID NO: 983 - DNA, 60 bp, Artificial Sequence
  Probe
gcatgaattcaagtatagctgtcatctcagtcttcctgcctcatcaagtcaagtgcagcg

SEQ ID NO: 984 - DNA, 60 bp, Artificial Sequence
  Probe
ctacagccctctggtcagcagcaccaactttctcacggagttaaattagtttgggttatg

SEQ ID NO: 985 - DNA, 60 bp, Artificial Sequence
  Probe
gaggagtcatgtgaaggaaagctacctttagtcctccatcgcaatactgtccagtgtctc

SEQ ID NO: 986 - DNA, 60 bp, Artificial Sequence
  Probe
cttcagacagtgccagtcctttttccccttctttaaaagcgatatgtggatggaggagtg

SEQ ID NO: 987 - DNA, 60 bp, Artificial Sequence
  Probe
gacattgaaaaaacaataaaggcatgcaaacccagtgaccagatcctgaagctgctcagt

SEQ ID NO: 988 - DNA, 60 bp, Artificial Sequence
  Probe
tttttatgtcagtgcctgatgctgtgcccttttcttcccttggtgtgattgcttttactg

SEQ ID NO: 989 - DNA, 60 bp, Artificial Sequence
  Probe
agtatacgctgccctcataacagaactctcaacaattgtcatcggagtagattccgggtg

SEQ ID NO: 990 - DNA, 60 bp, Artificial Sequence
  Probe
aagttctcagtaatgaacctcatgagacaatgccaattgctgccttgggacaaaaacagc

SEQ ID NO: 991 - DNA, 60 bp, Artificial Sequence
  Probe
gagagtacttttgaatgcagggggacaaagtctgggtataccctcctgaaaagaaggaga

SEQ ID NO: 992 - DNA, 60 bp, Artificial Sequence
  Probe
agtttgatctcaaaatctccccagctcacggcagtgtaatatgcatagggagtaagaggt

SEQ ID NO: 993 - DNA, 60 bp, Artificial Sequence
  Probe
aagctaccaacaaaggaggtgctcatatgaacgaaaggggacaggatagaagagaagagg

SEQ ID NO: 994 - DNA, 60 bp, Artificial Sequence
  Probe
tctcacaccaggatgactgggtcttagcacgacctaatcgtcttcatgatggaaagaaag

SEQ ID NO: 995 - DNA, 60 bp, Artificial Sequence
  Probe
cttgtgaaaaactccggtgttcctggtaaccacatagtgtataaagcccctcattgcact

SEQ ID NO: 996 - DNA, 60 bp, Artificial Sequence
  Probe
tttggggttcctcagcgctatgaggctactagaagctctgcttagtttttagcctcttag

SEQ ID NO: 997 - DNA, 60 bp, Artificial Sequence
  Probe
cctgtcttagtaccaacaaaggaaggcacaccctcactaaaagtagagcagaggtgagag

SEQ ID NO: 998 - DNA, 60 bp, Artificial Sequence
  Probe
gtgatggtttctcgagcagaaattgacatgttggatatccgggcacacttcaagagactc

SEQ ID NO: 999 - DNA, 60 bp, Artificial Sequence
  Probe
caataaacccagaactcttacagcttcttcccttacatccgaaggacaatctgcccttgc

SEQ ID NO: 1000 - DNA, 60 bp, Artificial Sequence
  Probe
cttcagcaccacctctaagatctctgagagagggtggatcagcctctgtgtaaacaaaaa

SEQ ID NO: 1001 - DNA, 60 bp, Artificial Sequence
  Probe
ggcgatatggaacaacagagaggaaattcatgggattaagggcagataggcttggatgtg

SEQ ID NO: 1002 - DNA, 60 bp, Artificial Sequence
  Probe
ctttattgctgatgaaatacagacaggattggccagaactggtagatggctggctgttga

SEQ ID NO: 1003 - DNA, 60 bp, Artificial Sequence
  Probe
agagatgcttttcccgacgtgaatggaatattctgaggattaggacgtggacctaccttg

SEQ ID NO: 1004 - DNA, 60 bp, Artificial Sequence
  Probe
ctggtagttctgtaattaagcaagtgaccacccctctgtgcctcagttccttcatctgta

SEQ ID NO: 1005 - DNA, 60 bp, Artificial Sequence
  Probe
gaaaaagatgcctgtggctggaggaaaagctaataaggacaggacagaagacaagcaaga

SEQ ID NO: 1006 - DNA, 60 bp, Artificial Sequence
  Probe
tccttcccagacctgtgtgcagcatttaacgtcatatgtgataatgtggggaaagattgg

SEQ ID NO: 1007 - DNA, 60 bp, Artificial Sequence
  Probe
gggatcctagtaactgctggtttctaggtgactaaacctggcagagagaatcatggaacc

SEQ ID NO: 1008 - DNA, 60 bp, Artificial Sequence
  Probe
tgtgcaagtcacttttcccctgtaggcctcggtttattctccgtaaaatcagaaagttgg

SEQ ID NO: 1009 - DNA, 60 bp, Artificial Sequence
  Probe
ttacacccagcgtttctttaataggagtggagtagggttgtttacaaaggccctggtcta

SEQ ID NO: 1010 - DNA, 60 bp, Artificial Sequence
  Probe
tataaagccaattcccgcagttatttatcctggaccacatattgccagacacagctctgc

SEQ ID NO: 1011 - DNA, 60 bp, Artificial Sequence
  Probe
tttccaggctgtcttctgagttgaacatgatggcaaaggagagcaaaatagcagatgtca

SEQ ID NO: 1012 - DNA, 60 bp, Artificial Sequence
  Probe
attcctttgctgcctcttatcttctctcattgatcagcctgtctccatgtgttcaatgcc

SEQ ID NO: 1013 - DNA, 60 bp, Artificial Sequence
  Probe
ttctcctctgatcgcggatccactctgcttagccctcattgaaacttcttccttatcatc

SEQ ID NO: 1014 - DNA, 60 bp, Artificial Sequence
  Probe
ccactagactgaaagaagttcctgttaatccaaaggcctgacctgaggaccacaggataa

SEQ ID NO: 1015 - DNA, 60 bp, Artificial Sequence
  Probe
tatgggctctacgagaatctgtgaaacccatcattcttgtgttcagttctctcaccccat

SEQ ID NO: 1016 - DNA, 60 bp, Artificial Sequence
  Probe
gatgaggaagaataaagcagtcaaagaagagcagtgttaggctgcaattctccatccgca

SEQ ID NO: 1017 - DNA, 60 bp, Artificial Sequence
  Probe
ggaacgtaatcgtgtcccctatcctacttccccttcctaattccacagctgctcaataaa

SEQ ID NO: 1018 - DNA, 60 bp, Artificial Sequence
  Probe
ggatgtatgtggaaaagctcttcttactccaggtaaggtctcttcccttcttggtgaggg

SEQ ID NO: 1019 - DNA, 60 bp, Artificial Sequence
  Probe
taggatttgcatcagatgtctgcgggtctacatagagtaaaagcaggggaaatgctctca

SEQ ID NO: 1020 - DNA, 60 bp, Artificial Sequence
  Probe
ggaaaagattggtttagagaaggccctcctatctgcagagttagctgatccactggagag

SEQ ID NO: 1021 - DNA, 60 bp, Artificial Sequence
  Probe
cttgatacagactcattggactgaatttcccccttccccccattgatggaagaatgttcc

SEQ ID NO: 1022 - DNA, 60 bp, Artificial Sequence
  Probe
atggcagttttttggcaaggcctagtaaaagtaaccctggagacttcacactttccgtta

SEQ ID NO: 1023 - DNA, 60 bp, Artificial Sequence
  Probe
agcagcagctctttcagaggactaatgcactaacagttcaacagttaactgcagctcaac

SEQ ID NO: 1024 - DNA, 60 bp, Artificial Sequence
  Probe
tatttcggcccgtatcgaacttttgttctcagtatcagcccatggtttcaggatcaaagc

SEQ ID NO: 1025 - DNA, 60 bp, Artificial Sequence
  Probe
aagactggtcggtttgcatatgaaaggcatgagttgtttctgatctccaggaatcaagca

SEQ ID NO: 1026 - DNA, 60 bp, Artificial Sequence
  Probe
gagttcaggtgaagatgtgaaggtgagagaagaggatgggtagacatttccctggtgaag

SEQ ID NO: 1027 - DNA, 60 bp, Artificial Sequence
  Probe
cagtggtggtcaggaatagcaaaaactaaactccttctgcaaggacagacctaggcaaag

SEQ ID NO: 1028 - DNA, 60 bp, Artificial Sequence
  Probe
cacaagaagcaaaacgctggagagggacagatgtctacagaagatgttttgggacagttt

SEQ ID NO: 1029 - DNA, 60 bp, Artificial Sequence
  Probe
ctgtctaacttgctatctatggcaggacctttgaagggttcacaggaagcagcacaaatt

SEQ ID NO: 1030 - DNA, 60 bp, Artificial Sequence
  Probe
aacataaagacagcttgtctgaggcaacatacaatccaccaaagtcacctgcttgtctgt

SEQ ID NO: 1031 - DNA, 60 bp, Artificial Sequence
  Probe
agtgagccccattctgtgacaatcagtaggactcaagacatgctgtaatcctaccaatgt

SEQ ID NO: 1032 - DNA, 60 bp, Artificial Sequence
  Probe
ttgttctttctcagccaccacagctattccagcagctcatttcttcacttcacatctgtt

SEQ ID NO: 1033 - DNA, 60 bp, Artificial Sequence
  Probe
tcacagtaaaaatgctctttccccaggtacaggatatatggccatctggcctggatatca

SEQ ID NO: 1034 - DNA, 60 bp, Artificial Sequence
  Probe
gtctggaacaagtgtcacaattacaaggattgtggcgtcgcttcaatcgacctttactga

SEQ ID NO: 1035 - DNA, 60 bp, Artificial Sequence
  Probe
caatgctcatgtgacagcacactcaagtcacagtggctcatggtatgaatagtcactgtg

SEQ ID NO: 1036 - DNA, 60 bp, Artificial Sequence
  Probe
tttcctggggagttgattaaagttacagattttcaagcctcacccagtggaattggggag

SEQ ID NO: 1037 - DNA, 60 bp, Artificial Sequence
  Probe
gaaggtggggcaattctgactgagtaaagaaggaacagccattctgtttagcacgagaag

SEQ ID NO: 1038 - DNA, 60 bp, Artificial Sequence
  Probe
cacctctggcgttaagtcctgactcctacctgtttcaccatcactgcagttttaagagta

SEQ ID NO: 1039 - DNA, 60 bp, Artificial Sequence
  Probe
gggctcagggaagaagagaagtaaggattataagtctacagtggaggcttcagttgtggc

SEQ ID NO: 1040 - DNA, 60 bp, Artificial Sequence
  Probe
gaaggagccttctgaagcaaatatcagagtcactcctctgcttaaagctcctctcactcc

SEQ ID NO: 1041 - DNA, 60 bp, Artificial Sequence
  Probe
gcaatgctcacctcttctttaccagaacggttctttgaccagcacattaacttctggact

SEQ ID NO: 1042 - DNA, 60 bp, Artificial Sequence
  Probe
cagtgctgtaaaaactgtgggatgctcctcccttctctacctcatgggggtattgtataa

SEQ ID NO: 1043 - DNA, 60 bp, Artificial Sequence
  Probe
tgtcccaccgttaaccactccctgcttagactgaacagttaatcttctgcagagtaactg

SEQ ID NO: 1044 - DNA, 60 bp, Artificial Sequence
  Probe
acatccaatccatatcaaggacggtgactggaatgaattccggaggaaactgacgttcta

SEQ ID NO: 1045 - DNA, 60 bp, Artificial Sequence
  Probe
ccttgagttgttgcaagaaagaatactccaagtgtgggtagaggggacgcaatgtgtaag

SEQ ID NO: 1046 - DNA, 60 bp, Artificial Sequence
  Probe
ctggaaaccagtgaaaatttctgagcagaggagtaacatgatgggaaccacactttggga

SEQ ID NO: 1047 - DNA, 60 bp, Artificial Sequence
  Probe
gttagcctttggtagattcatctggttaggctctgatagagagtttcccttgaggccagg

SEQ ID NO: 1048 - DNA, 60 bp, Artificial Sequence
  Probe
tggaaaagaattggggtaggggtgtggcacatggcacttaagttgaggtttatgttagag

SEQ ID NO: 1049 - DNA, 60 bp, Artificial Sequence
  Probe
aatcaaggaacccacacagaaggtgatctccattgctaactgaccagcaaattacacagg

SEQ ID NO: 1050 - DNA, 60 bp, Artificial Sequence
  Probe
ctggatcatttattgcctgtattgctgacctttagtccccagctccttccagaagtttgg

SEQ ID NO: 1051 - DNA, 60 bp, Artificial Sequence
  Probe
cgtgttcaccgtgaccatggagaatctcaaaagagatgatgctgacagttattggtgtgg

SEQ ID NO: 1052 - DNA, 60 bp, Artificial Sequence
  Probe
gattctcctcaggctttggccctgcaagcaaacccacatatctgctctgtatgtaataaa

SEQ ID NO: 1053 - DNA, 60 bp, Artificial Sequence
  Probe
ccttatccaccacgctattatagtttccgttgtcctccaccagcatttcccttactctga

SEQ ID NO: 1054 - DNA, 60 bp, Artificial Sequence
  Probe
gtgcgcggcgcagagcctttgggaataaaaagccattctgcgaaaaaaaaaaaaaaaaaa

SEQ ID NO: 1055 - DNA, 60 bp, Artificial Sequence
  Probe
aaaggtccaggctccagtaggagagaaagaactcctcataggaatactgaagaagtggga

SEQ ID NO: 1056 - DNA, 60 bp, Artificial Sequence
  Probe
tcagggaaagtgcctattgtaaaaagaactgagggtgctatggtgttgagctgagagaga

SEQ ID NO: 1057 - DNA, 60 bp, Artificial Sequence
  Probe
agacccattaagtatattaatgagttcctggcaccagccctgtgcactcaggtaactgat

SEQ ID NO: 1058 - DNA, 60 bp, Artificial Sequence
  Probe
cgaattataattcctcaagccctctttcccctcccatcctttgcccatgctgttctttat

SEQ ID NO: 1059 - DNA, 60 bp, Artificial Sequence
  Probe
agggacaagggaaaaatccacttccaagttcaatctggttgtgagcagaattcagttcct

SEQ ID NO: 1060 - DNA, 60 bp, Artificial Sequence
  Probe
acagggtaagtttttcctggggcacctcttgaccctatctccataataaggaacatggat

SEQ ID NO: 1061 - DNA, 60 bp, Artificial Sequence
  Probe
acaatacttgaaccaccctccccctgtcagtagatctatgaataagcctttggagcaaca

SEQ ID NO: 1062 - DNA, 60 bp, Artificial Sequence
  Probe
ttttggtacccatttgatacactgtggctggtaggtaagtaggttggtgtaagtggacct

SEQ ID NO: 1063 - DNA, 60 bp, Artificial Sequence
  Probe
ggcccattggaactacttcagtttgatcacgggcagtcaaatccaacttactacatcagg

SEQ ID NO: 1064 - DNA, 60 bp, Artificial Sequence
  Probe
tgcgactgatagattggggtctggcagaattctatcatcctgctcaggagtacaatgttc

SEQ ID NO: 1065 - DNA, 60 bp, Artificial Sequence
  Probe
cgctactgcaaccttcagaaatataatgggaagtctgaagacactgctgtgcaacatggt

SEQ ID NO: 1066 - DNA, 60 bp, Artificial Sequence
  Probe
tcatggtggattcaagaactccctagtgaggagctgaacttgctcaatctaaggctgatt

SEQ ID NO: 1067 - DNA, 60 bp, Artificial Sequence
  Probe
aaagaatgggaagttgcctcctgctgatttaaagatgctttccctcgaagaggatgtcac

SEQ ID NO: 1068 - DNA, 60 bp, Artificial Sequence
  Probe
cttcctgatagaagatgggaaggagagggcagaactttgcctgctgtcatatctgaagaa

SEQ ID NO: 1069 - DNA, 60 bp, Artificial Sequence
  Probe
aagtgaaaacacacagtatctctaaggcctagctaaggaccagcacagcatcacttctgt

SEQ ID NO: 1070 - DNA, 60 bp, Artificial Sequence
  Probe
tgcctgatctttgcaaaatcaggagcattggatcaaagctatgtgaagatcctgtgaggt

SEQ ID NO: 1071 - DNA, 60 bp, Artificial Sequence
  Probe
ctctttggatcaccagctttcagctcagggcctgccaatgagtaaatgatagttaacagg

SEQ ID NO: 1072 - DNA, 60 bp, Artificial Sequence
  Probe
acataaaatcgctcactctgtgcctcacatcaaagggagaaaatctgattgttcaggggg

SEQ ID NO: 1073 - DNA, 60 bp, Artificial Sequence
  Probe
tacactgaggctgctttaagttgcacattgatctgaagccttgggcttctgttcctattc

SEQ ID NO: 1074 - DNA, 60 bp, Artificial Sequence
  Probe
gctctcttggtatccgtctttgtctggcatctaggaagaatcaggtcacatcaacctgaa

SEQ ID NO: 1075 - DNA, 60 bp, Artificial Sequence
  Probe
tgagttaacgaggcctgtggcaagcttttggtgtggtactcagttattttaatgtctgca

SEQ ID NO: 1076 - DNA, 60 bp, Artificial Sequence
  Probe
gttgtaaatattttatgggaaggcagcccaggaaaatctggttagctttccgccttgcac

SEQ ID NO: 1077 - DNA, 60 bp, Artificial Sequence
  Probe
actcacatctgtatgcaaatgcagcatcctctcaaccatgcctcttcttttcctcaagtt

SEQ ID NO: 1078 - DNA, 60 bp, Artificial Sequence
  Probe
taatattgacaggaaaccccatccagagtttagccctgggagccttttctggactatcaa

SEQ ID NO: 1079 - DNA, 60 bp, Artificial Sequence
  Probe
aggggtacccagatagtccttgttttaatgatgggttctctcaccactgtcttgatgctc

SEQ ID NO: 1080 - DNA, 60 bp, Artificial Sequence
  Probe
gaaagtgcttttctgctagaaaagcagcagcatatgtgagggtctaggtggagaaagagc

SEQ ID NO: 1081 - DNA, 60 bp, Artificial Sequence
  Probe
ggtgcctcagttttctctgtagcaccctcaagaagatatgctgagagtaatgagggtcag

SEQ ID NO: 1082 - DNA, 60 bp, Artificial Sequence
  Probe
gcctccccagatcttagtaagctatataagaactgccccaaagcaatgaagaggctggta

SEQ ID NO: 1083 - DNA, 60 bp, Artificial Sequence
  Probe
caatcccagctgacagccagtatcaactaacaaacatggtttgtttagctctagccacca

SEQ ID NO: 1084 - DNA, 60 bp, Artificial Sequence
  Probe
tctagagtacagtccctctcctataagcaagaagctctcgtgtgctagtgtcaaaagcca

SEQ ID NO: 1085 - DNA, 60 bp, Artificial Sequence
  Probe
ctgtagcatgggctgcatgatgttctgatttctcctacacagtctccattctcagtctga

SEQ ID NO: 1086 - DNA, 60 bp, Artificial Sequence
  Probe
ccctaggaagggggaaacgctactgtgtttactcctattttgtagatgagcacactgagg

SEQ ID NO: 1087 - DNA, 60 bp, Artificial Sequence
  Probe
gggttttagccttgggctggagaagccatagggcttggtgaataaattacttttgcaatg

SEQ ID NO: 1088 - DNA, 60 bp, Artificial Sequence
  Probe
gaatgtgctgatgacagggtaaagagtcgtcgatatgctttttggtagcttgcatgctca

SEQ ID NO: 1089 - DNA, 60 bp, Artificial Sequence
  Probe
gagaacagtatagcccaggattgaaagcccagctctggagtctaactgtctgggtaaaaa

SEQ ID NO: 1090 - DNA, 60 bp, Artificial Sequence
  Probe
gcaactattataagatgctctgaaaactcttcagacactgaggggcaccagaggagcaga

SEQ ID NO: 1091 - DNA, 60 bp, Artificial Sequence
  Probe
gcttttcatggtggcaggtgtccagaagtgggaatggaggaagatgactgaaatattctc

SEQ ID NO: 1092 - DNA, 60 bp, Artificial Sequence
  Probe
gcctgttccagttttagtactggaagtcccacatccttagaaacctctcattcctggaca

SEQ ID NO: 1093 - DNA, 60 bp, Artificial Sequence
  Probe
ccttcacacaatctccaagtcaccaaccatgctagtttcagcattcctgttggtaaagga

SEQ ID NO: 1094 - DNA, 60 bp, Artificial Sequence
  Probe
attccatgcacaaaaagagtgtagcagcaggaacacacaacaattcccttactcagacct

SEQ ID NO: 1095 - DNA, 60 bp, Artificial Sequence
  Probe
gaaaacctttctccctcaaccccatgcatgacagtccaataaagtcagaactggggttag

SEQ ID NO: 1096 - DNA, 60 bp, Artificial Sequence
  Probe
acatcttgagttcccatacaggctctgctacttactgtatggttctgggcaagttgctta

SEQ ID NO: 1097 - DNA, 60 bp, Artificial Sequence
  Probe
gagggagagcaatgttgttcagagaaagatcaacaggaggagaaactgtcagagctgtct

SEQ ID NO: 1098 - DNA, 60 bp, Artificial Sequence
  Probe
ggacaccagtgtatgttgggatgcaaacagggaggcttatgacatctaatgtgttttcca

SEQ ID NO: 1099 - DNA, 60 bp, Artificial Sequence
  Probe
taggattggtatgtttttccccatctgcacagctttccagaaaagggtcactggagtttt

SEQ ID NO: 1100 - DNA, 60 bp, Artificial Sequence
  Probe
cagagaagaggctgaattaaaagaagctgaaaaggggcaaaagaggcatccagagaaggt

SEQ ID NO: 1101 - DNA, 60 bp, Artificial Sequence
  Probe
gaagcatggtttgctctggatctaggtctggatagctccttttccataagtgcctcctta

SEQ ID NO: 1102 - DNA, 60 bp, Artificial Sequence
  Probe
ttccacgttcaatgttgtcgtgttggtagcttaagattgcccatgtcgggattatttcca

SEQ ID NO: 1103 - DNA, 60 bp, Artificial Sequence
  Probe
cttctggttgagcacttggtttgcctggatgatgctctggccttactcaatctttatcat

SEQ ID NO: 1104 - DNA, 60 bp, Artificial Sequence
  Probe
gcacatgagcaggactgaaagtatttgttctgttccacctctgtacctggcagaaatgtt

SEQ ID NO: 1105 - DNA, 60 bp, Artificial Sequence
  Probe
agttccccttctctataacccaagggaagtttctctcattctgcctttaggagctgcatt

SEQ ID NO: 1106 - DNA, 60 bp, Artificial Sequence
  Probe
gagcactatgctggctgtatttggggtacatttgccattttatgggatccttgcaacaac

SEQ ID NO: 1107 - DNA, 60 bp, Artificial Sequence
  Probe
tcaaaaaagcggcatggaaattcattgggctccattcgatacctcgtgtttagagatcgt

SEQ ID NO: 1108 - DNA, 60 bp, Artificial Sequence
  Probe
acctgttgatgctagttcagagtatcagcaagagctggagagggagctttttaagctcaa

SEQ ID NO: 1109 - DNA, 60 bp, Artificial Sequence
  Probe
gtggccaaacaaatcttcccctggatgaaagagtctcgacaaaacacaaagcagaaaacc

SEQ ID NO: 1110 - DNA, 60 bp, Artificial Sequence
  Probe
atttctcaacagttttcagagtgcatggacctcgcactaaaatcattgacctctggagcc

SEQ ID NO: 1111 - DNA, 60 bp, Artificial Sequence
  Probe
aaccagagcgtgatgtcctcatgcaagatttctacgtggttgagagtatcttctttccca

SEQ ID NO: 1112 - DNA, 60 bp, Artificial Sequence
  Probe
taaaagttgctgactaggaccttacccacagggtggcactctgtccttgggaaatataaa

SEQ ID NO: 1113 - DNA, 60 bp, Artificial Sequence
  Probe
gcctcagttggaatcttggtttacttgcttaccagccatgtgaccttaggcaagttagtt

SEQ ID NO: 1114 - DNA, 60 bp, Artificial Sequence
  Probe
cctcccctcaccacattgagaaatctcagtgagtcaccgagtggttctgcatattaatga

SEQ ID NO: 1115 - DNA, 60 bp, Artificial Sequence
  Probe
ggaagcattagtttggatgtaggcccttgttcagtcattttctctaaggccttggaagca

SEQ ID NO: 1116 - DNA, 60 bp, Artificial Sequence
  Probe
agcagccaggatcattggagtggatgtcaacaaggagaaatttaagaaggcacaggaatt

SEQ ID NO: 1117 - DNA, 60 bp, Artificial Sequence
  Probe
gaaacaaagatctctgataaacataacaacatagcaggctgggcgcagtggctcatgtct

SEQ ID NO: 1118 - DNA, 60 bp, Artificial Sequence
  Probe
cttctggattggttaatggaggtgagcttgagtcttcctgttcgcttcatgaaagcactg

SEQ ID NO: 1119 - DNA, 60 bp, Artificial Sequence
  Probe
tcaaacgacagaggagcttttctggaatttcaaaccattgctcttagtcccaagctaggc

SEQ ID NO: 1120 - DNA, 60 bp, Artificial Sequence
  Probe
acctattttcctcgggctcatttaactgggaaaagagccaagagaagtgcttgtctttgg

SEQ ID NO: 1121 - DNA, 60 bp, Artificial Sequence
  Probe
ttctgtcactgtataagtgatataagtgcacctctagctggacagctcctcaggtcctcc

SEQ ID NO: 1122 - DNA, 60 bp, Artificial Sequence
  Probe
taagaaggggagacagaagccatggaacataggaggaaaatgagggtgaaaactaggagc

SEQ ID NO: 1123 - DNA, 60 bp, Artificial Sequence
  Probe
attagaggtgctggaccaaactgtgctctactcccaggaagtgtgcagtcaatatatgac

SEQ ID NO: 1124 - DNA, 60 bp, Artificial Sequence
  Probe
catagaactccggaatgaccagcatgatattttcagagtcttgtccccggggtattagca

SEQ ID NO: 1125 - DNA, 60 bp, Artificial Sequence
  Probe
acataaatgtgccaacagcttgatggtggcgtttttgaaatgtagaacagagtgcttgca

SEQ ID NO: 1126 - DNA, 60 bp, Artificial Sequence
  Probe
catcagttcagaagcatttccagatcctggctcctttcaggttagggtcaattcattgca

SEQ ID NO: 1127 - DNA, 60 bp, Artificial Sequence
  Probe
cgatgcatttacagagaacatggcaggagagaatcagctgctggagaggagaagacttta

SEQ ID NO: 1128 - DNA, 60 bp, Artificial Sequence
  Probe
tttcccaagcaggagacatcaggataatgggaacagaagacaggaggtttatcccatgaa

SEQ ID NO: 1129 - DNA, 60 bp, Artificial Sequence
  Probe
tttcccgcagcaacttataccatttgactgctccttgagctgtgataagagatgcctttg

SEQ ID NO: 1130 - DNA, 60 bp, Artificial Sequence
  Probe
tccccatgcctctttgctgtttgtggaaaataaagcattctataggcggagctagtgaac

SEQ ID NO: 1131 - DNA, 60 bp, Artificial Sequence
  Probe
ctgaggaacacaacaaaatggtctactttgccatctcggattatgtcttcaacacggcca

SEQ ID NO: 1132 - DNA, 60 bp, Artificial Sequence
  Probe
tggcttataaagaaggccatctgagcccagatattgtggctgaacaaaagaagctggaag

SEQ ID NO: 1133 - DNA, 60 bp, Artificial Sequence
  Probe
ctacaacctcacagaagctgcttaacccatggatcctgaaaacataggcaagaagcacag

SEQ ID NO: 1134 - DNA, 60 bp, Artificial Sequence
  Probe
aacagcacagcgggatcctagcagtgcaagttcaaaagtaagtccaatcatttctgtgat

SEQ ID NO: 1135 - DNA, 60 bp, Artificial Sequence
  Probe
cactccttcctcattttgctgctgattctagccccaaacaaaacaggttgagctttttcc

SEQ ID NO: 1136 - DNA, 60 bp, Artificial Sequence
  Probe
gccgaattcagggaacagattctccgtgtgaaggctgaagaagataaaattccactgctc

SEQ ID NO: 1137 - DNA, 60 bp, Artificial Sequence
  Probe
cattgaagctggaagccatcataccttactgccttgaaacccctaggactcagctaagta

SEQ ID NO: 1138 - DNA, 60 bp, Artificial Sequence
  Probe
ctttgggccaccatgttatctctctgagcctcagtttccttatggtgagaacacagtagt

SEQ ID NO: 1139 - DNA, 60 bp, Artificial Sequence
  Probe
aggttgtggtttcacttgtgtaatcctgagagcttgacagcttcgaggagtgtctaacat

SEQ ID NO: 1140 - DNA, 60 bp, Artificial Sequence
  Probe
cttgttgctggactagtgatcactgtcattgtcattgttggagccattcttttcgtccca

SEQ ID NO: 1141 - DNA, 60 bp, Artificial Sequence
  Probe
tcttaagtagtcacctttgtaacccttgcaatgctgagcatgagactgaacactggagga

SEQ ID NO: 1142 - DNA, 60 bp, Artificial Sequence
  Probe
atctgagaaatgatgagagatgggatgaactgcagaccatccatgggtcaaagaacagga

SEQ ID NO: 1143 - DNA, 60 bp, Artificial Sequence
  Probe
ggcttgaattggttgtttaaagctgggtaaatgcccccttgacattctgttgacactgtc

SEQ ID NO: 1144 - DNA, 60 bp, Artificial Sequence
  Probe
ctgtgtctttgctcatgttggccctctggaaatgatttcccccttttttttaagtgctcc

SEQ ID NO: 1145 - DNA, 60 bp, Artificial Sequence
  Probe
caatctttgaaggtggaaaagcaacttgttttgcatatggccagacaggaagtggcaaga

SEQ ID NO: 1146 - DNA, 60 bp, Artificial Sequence
  Probe
gggaaactgaggcttaggaagagaatgaaacttgtggagagcttatacagagcctctggg

SEQ ID NO: 1147 - DNA, 60 bp, Artificial Sequence
  Probe
aagaatataaaaggcaactgctggcagagagacagaagcggattgagcagcagaaagaac

SEQ ID NO: 1148 - DNA, 60 bp, Artificial Sequence
  Probe
tgcgtgactttgggcaagtcaaacggccttttctaaaatgtgagacagagattaaaggga

SEQ ID NO: 1149 - DNA, 60 bp, Artificial Sequence
  Probe
actgtctgtaaaataatattcagtctggcctcaacctgtctttccagcctcggtgacaca

SEQ ID NO: 1150 - DNA, 60 bp, Artificial Sequence
  Probe
ttgtttctcaagaccagtttccctgatggccttggcagtttttgagtattgatcaggtgt

SEQ ID NO: 1151 - DNA, 60 bp, Artificial Sequence
  Probe
cttccttactttgctggaaatcttggtggctggtcaaaatccattgaagaaacagcagcc

SEQ ID NO: 1152 - DNA, 60 bp, Artificial Sequence
  Probe
cccttaccagagctgaaaatgaaaaagagaacagcagctttctagggacagctggaaagg

SEQ ID NO: 1153 - DNA, 60 bp, Artificial Sequence
  Probe
atgaatcccatttgcctattgaccctgcagttagcatgctgtcaccctgaatcataatcg

SEQ ID NO: 1154 - DNA, 60 bp, Artificial Sequence
  Probe
gggaaactctgctgtcaactaagcaaactctaaatttaacatttgggggacccccttgga

SEQ ID NO: 1155 - DNA, 60 bp, Artificial Sequence
  Probe
caggtcactttacctctgtggacctgttttctctttgtgaagctagggagttagaggctg

SEQ ID NO: 1156 - DNA, 60 bp, Artificial Sequence
  Probe
gtattttaaacccggctggctggatcatgtcactttcttatagaagccctgcctttccag

SEQ ID NO: 1157 - DNA, 60 bp, Artificial Sequence
  Probe
aagtgaagggaaggggagttgggatggcctgtaagattagagtgtggattttgagaaaga

SEQ ID NO: 1158 - DNA, 60 bp, Artificial Sequence
  Probe
atttaggccacttggtgctcataacacctctatgtcaggtgaacactattgtcatcccca

SEQ ID NO: 1159 - DNA, 60 bp, Artificial Sequence
  Probe
cagttcttccttggtcatggcttacgtaacacagagttctctgaacagatggactgtggt

SEQ ID NO: 1160 - DNA, 60 bp, Artificial Sequence
  Probe
cgtccatcgagactcatttggtcgtagatgatagaaagctgagacctgcttcagcacaaa

SEQ ID NO: 1161 - DNA, 60 bp, Artificial Sequence
  Probe
ttgtttggagaacaacaaggacaactttatgtagagaaaaggaggggacgggacagacga

SEQ ID NO: 1162 - DNA, 60 bp, Artificial Sequence
  Probe
ttctcagccttctctgagggcactttgcaaatacctgagtccaaacagaagtaccaacta

SEQ ID NO: 1163 - DNA, 60 bp, Artificial Sequence
  Probe
actttcagactgctcacagaaggaatatgctgaaaggccaacatgagaaagaagcagcag

SEQ ID NO: 1164 - DNA, 60 bp, Artificial Sequence
  Probe
tcttggcactggaagggtagttctggaaagctactttgttgagagtctcattcttccctg

SEQ ID NO: 1165 - DNA, 60 bp, Artificial Sequence
  Probe
aatggaagcaaagaaacagatgactggctgatgctagagttggggaactctgagatctga

SEQ ID NO: 1166 - DNA, 60 bp, Artificial Sequence
  Probe
ccacctcccagagttcttaacagatgtgaaagtgccagggcacacagtagatactaatcc

SEQ ID NO: 1167 - DNA, 60 bp, Artificial Sequence
  Probe
cttgcccctgctcaattatcattggctcctcttgcctgccatagaacttaagcaagtatt

SEQ ID NO: 1168 - DNA, 60 bp, Artificial Sequence
  Probe
tttttctgatccagaccctcggcacctgctacttaccaactggaaaattttatgcatccc

SEQ ID NO: 1169 - DNA, 60 bp, Artificial Sequence
  Probe
aatggtagtggtcgatatatctctgcagcacctggagcagaagcaaaatatcgaagtgct

SEQ ID NO: 1170 - DNA, 60 bp, Artificial Sequence
  Probe
tgattagtaatgtctgccacaggcacaagattgacaagaggaggggtgtatgctgtgtat

SEQ ID NO: 1171 - DNA, 60 bp, Artificial Sequence
  Probe
tgctgaaacaggattatgagagtgacagacacaggactgaagacagggagaaaatgtgca

SEQ ID NO: 1172 - DNA, 60 bp, Artificial Sequence
  Probe
tattctgggcaccaaaagcacatgtaactgcatactggcaacagtgagacaagctaacaa

SEQ ID NO: 1173 - DNA, 60 bp, Artificial Sequence
  Probe
ctatgtctctcctgtgcttctctttcatttcccccctgatgtcttgtgaattctcccctt

SEQ ID NO: 1174 - DNA, 60 bp, Artificial Sequence
  Probe
agatttgaaagctattcttgcaggcaggtggagaatcttaaggatctctgacaccccagt

SEQ ID NO: 1175 - DNA, 60 bp, Artificial Sequence
  Probe
aagacctaacgcctactcagagtatctgcctgggaaatggagagacctcaacttttagga

SEQ ID NO: 1176 - DNA, 60 bp, Artificial Sequence
  Probe
cccggcaacaagcagaagaagcttcacaggagtcagaaaacgaactcaaggaaatgatag

SEQ ID NO: 1177 - DNA, 60 bp, Artificial Sequence
  Probe
ggataatcatctcttgtatgggctgtttgtgcattgtaggatgttgagcagcatccctgg

SEQ ID NO: 1178 - DNA, 60 bp, Artificial Sequence
  Probe
ccaaaagtacataaaagacaatgaccatcacccagtgccggtgatgctagaaggaaaggg

SEQ ID NO: 1179 - DNA, 60 bp, Artificial Sequence
  Probe
tgcagaaacagtgtgagaaattaagtcctggttcactgcgcagtagcaaagatggtcaag

SEQ ID NO: 1180 - DNA, 60 bp, Artificial Sequence
  Probe
ggcagttgacccactggaatttctataaggctggtacccttcccagagttacagaatctt

SEQ ID NO: 1181 - DNA, 60 bp, Artificial Sequence
  Probe
agtctgtcttgagatctgattttttccccctttacctagctgtgccccctctggttattt

SEQ ID NO: 1182 - DNA, 60 bp, Artificial Sequence
  Probe
gccagatatggaagcagaattgctgacactttgttatccaaaccaagaggcctgtcttca

SEQ ID NO: 1183 - DNA, 60 bp, Artificial Sequence
  Probe
caggcaataaaatgccagccaggacactgaagaacacagcaatgaaacaaattccatcca

SEQ ID NO: 1184 - DNA, 60 bp, Artificial Sequence
  Probe
aaaaaatctgaaactggtcaagaaagaacaaggaagacttgccaaagcaaggccggtgtg

SEQ ID NO: 1185 - DNA, 60 bp, Artificial Sequence
  Probe
atgacagaaagaactccagaaatctgcaaagggatcaccttgagtctggctggatacagt

SEQ ID NO: 1186 - DNA, 60 bp, Artificial Sequence
  Probe
acaagagttgaaagacatgttttctagatggctcactcacatggctggcaacttggtgtt

SEQ ID NO: 1187 - DNA, 60 bp, Artificial Sequence
  Probe
ctgttgctgtgaggaatgcattcagaagtcttcaacggtgaccagtgatgacaatgacaa

SEQ ID NO: 1188 - DNA, 60 bp, Artificial Sequence
  Probe
gacaaccagtaccttaaagtcctcctggctctgaagcttcataagatgcgtgaagaaggt

SEQ ID NO: 1189 - DNA, 60 bp, Artificial Sequence
  Probe
agtcagagggcagaccctgtgaatataactccagaatctaccaaaacggggaaagtttcc

SEQ ID NO: 1190 - DNA, 60 bp, Artificial Sequence
  Probe
gcataggtacccattaagcccattgtgttcactggtttcttcctgcatttgtgagtcact

SEQ ID NO: 1191 - DNA, 60 bp, Artificial Sequence
  Probe
ggggcaacgttcacaatatttatcagcctgtaaggtgtagctgatccaattggaatggct

SEQ ID NO: 1192 - DNA, 60 bp, Artificial Sequence
  Probe
ttttctctcacatttttggtgggggattgttcggcttcatgggcaatcagagtagaagtc

SEQ ID NO: 1193 - DNA, 60 bp, Artificial Sequence
  Probe
cacccaaggttttaagcacgttctttcatcagaccctggcccaatacctatgtatgcaat

SEQ ID NO: 1194 - DNA, 60 bp, Artificial Sequence
  Probe
aaccatcttaatagcatgctgctcctttttgctcagtgtccacagcaagatgacgtgatt

SEQ ID NO: 1195 - DNA, 60 bp, Artificial Sequence
  Probe
cagaacactataggtcacctccttgccccacactggaaatctcaagcttatccatgtctt

SEQ ID NO: 1196 - DNA, 60 bp, Artificial Sequence
  Probe
cagtgctgaccaatcaaattcctctactgggaatttggaagtgggccattcaaccagtta

SEQ ID NO: 1197 - DNA, 60 bp, Artificial Sequence
  Probe
tctcttaacctttacctcatacaagaccagcttgtcactgctccttatgcctcaaacccg

SEQ ID NO: 1198 - DNA, 60 bp, Artificial Sequence
  Probe
ttcaaagcccaaacccaaagtggaacctccaaaagaggaacaaaaaaatgcagagcagaa

SEQ ID NO: 1199 - DNA, 60 bp, Artificial Sequence
  Probe
agttgcccttggaaacatgtatgaactgaagcacgcttcacatatcagcaagttacccaa

SEQ ID NO: 1200 - DNA, 60 bp, Artificial Sequence
  Probe
catgtctgggtcgtcttttgaaaagctcacttcaagctcaccctgctcctacctatcata

SEQ ID NO: 1201 - DNA, 60 bp, Artificial Sequence
  Probe
acatctcctcctactgtatatttattcttgtggggaatgagtcctgccctacggggagtt

SEQ ID NO: 1202 - DNA, 60 bp, Artificial Sequence
  Probe
accttgagtaaatggctttaaaatcctctctccaccatgtgctcatctggaacaggggta

SEQ ID NO: 1203 - DNA, 60 bp, Artificial Sequence
  Probe
tcatctactcccaagaacaggaaaactcggagaaaaacagtcccatcagatgtccccttg

SEQ ID NO: 1204 - DNA, 60 bp, Artificial Sequence
  Probe
cttctttcttgaagggcatcacagccactgtacttatcaatgcctgtgtagccaacacag

SEQ ID NO: 1205 - DNA, 60 bp, Artificial Sequence
  Probe
agatcaagattcggagtttgggctgcctaatagctgcaatgatactgttgtcctcactca

SEQ ID NO: 1206 - DNA, 60 bp, Artificial Sequence
  Probe
aatcaaagactattggatacatttggcattgggctgagtgtggtggctcatgcctgtaat

SEQ ID NO: 1207 - DNA, 60 bp, Artificial Sequence
  Probe
aattataaccgagggctggcgttttggaatgcaatttgcacagggattggaacatgattt

SEQ ID NO: 1208 - DNA, 60 bp, Artificial Sequence
  Probe
tcaactgaccttgggccagcaggtttttaactaaattgttacttgcctttctcacccagt

SEQ ID NO: 1209 - DNA, 60 bp, Artificial Sequence
  Probe
ttcccacattggcctacttgctacccctcaaatactctggatatgatcctgttgtaaggc

SEQ ID NO: 1210 - DNA, 60 bp, Artificial Sequence
  Probe
gtctctgtaatacagtgtcccagaggatgctccacagtgccgataaacttgggttaagtg

SEQ ID NO: 1211 - DNA, 60 bp, Artificial Sequence
  Probe
ctgctttctgtggaaaagattctaacttggttccctgccatccctgaatacaaacgggtt

SEQ ID NO: 1212 - DNA, 60 bp, Artificial Sequence
  Probe
ctgaagcccagaatagctacatgatgcctctaaggtcttttccttggtgagcctgagaat

SEQ ID NO: 1213 - DNA, 60 bp, Artificial Sequence
  Probe
ggagaaacccttgaaaagacatcaagcacagaaggaggaggaggaggtttaggtcaagaa

SEQ ID NO: 1214 - DNA, 60 bp, Artificial Sequence
  Probe
aggcggtttgcacaaccctctagtgcgtcgtttcctcttctgtgaaatactttataggat

SEQ ID NO: 1215 - DNA, 60 bp, Artificial Sequence
  Probe
tcccgatttgacaaatgccaggaaaaggaaactgttgagaaaccgaaactactggggaaa

SEQ ID NO: 1216 - DNA, 60 bp, Artificial Sequence
  Probe
atctttaaaggccattgctgatcctgccttgttccttggttgcagtccttgtaagaagag

SEQ ID NO: 1217 - DNA, 60 bp, Artificial Sequence
  Probe
caattcctactctgctattggaaaaacaggggagcagggaagagaaagcattttccccag

SEQ ID NO: 1218 - DNA, 60 bp, Artificial Sequence
  Probe
tatgaatgggaaaggagaaggtggcataagttcagacccagagtgtgctacagttcttgg

SEQ ID NO: 1219 - DNA, 60 bp, Artificial Sequence
  Probe
cccctgagataggtgctactgttattcctatttgacagactgagacactgaggtggtcgt

SEQ ID NO: 1220 - DNA, 60 bp, Artificial Sequence
  Probe
tgtgatgggcacacacacaaacacacacacagtgccttagccatgagtaatataagcaaa

SEQ ID NO: 1221 - DNA, 60 bp, Artificial Sequence
  Probe
atctagtccagttcctgcttactgctttgctaatagctggccttgctagaatccttggtt

SEQ ID NO: 1222 - DNA, 60 bp, Artificial Sequence
  Probe
gtcaatcataaactgcgccaggagaacatggtgctgaagctggcaaatcaaaagaacaag

SEQ ID NO: 1223 - DNA, 60 bp, Artificial Sequence
  Probe
cgtcattcttcgttcacagcaaacaggattcctaaatgcccttaaggacagtcctgcaag

SEQ ID NO: 1224 - DNA, 60 bp, Artificial Sequence
  Probe
ggctgattcagatgccagggtaaggaagtgcttacaaaatactgctgcagttcatcttcc

SEQ ID NO: 1225 - DNA, 60 bp, Artificial Sequence
  Probe
atttctggcagacatgtctccatcttctacctggcatattttacctgcctcagtgtaccc

SEQ ID NO: 1226 - DNA, 60 bp, Artificial Sequence
  Probe
catgtcccatgtgtctacccagatgccagagtagggatgtcaagatacatgcagtcattc

SEQ ID NO: 1227 - DNA, 60 bp, Artificial Sequence
  Probe
agagggtttttctgttgacagctctggattgtttgggtagatactgacagggcagatacc

SEQ ID NO: 1228 - DNA, 60 bp, Artificial Sequence
  Probe
agtgtgccaattgggaccagtatcaaaagagagccttgaagaaagaaagaaagggcttcc

SEQ ID NO: 1229 - DNA, 60 bp, Artificial Sequence
  Probe
ttgtacctaagtcagagttcatatgggtccatcactttttagctggcagagcaggttccc

SEQ ID NO: 1230 - DNA, 60 bp, Artificial Sequence
  Probe
ggacagtactatctggccaaacaaccaacatagtgacacatagggcccaagaaatgttgc

SEQ ID NO: 1231 - DNA, 60 bp, Artificial Sequence
  Probe
atgactaaggagctgaagaaggcccccagaagcggatttgtggtgggttattttattttg

SEQ ID NO: 1232 - DNA, 60 bp, Artificial Sequence
  Probe
tcctggcttgcgtaatggaatgtgaaggtaaactgccttctctgaaaatttgggaaacct

SEQ ID NO: 1233 - DNA, 60 bp, Artificial Sequence
  Probe
tccagttcactgacaaacatggggaaggtaagccatctgtctgataacaggacaacagag

SEQ ID NO: 1234 - DNA, 60 bp, Artificial Sequence
  Probe
cacataacagaatgggttgattccatgttatggtctgcccataagttggggcttatggca

SEQ ID NO: 1235 - DNA, 60 bp, Artificial Sequence
  Probe
gtcttaagtttgagggatctgagatttcccagattcccggctgcacagaattttcttgcg

SEQ ID NO: 1236 - DNA, 60 bp, Artificial Sequence
  Probe
tccttctcaagctaagaaaggaaaacggaatttcccaattcctctggctgcagctttcag

SEQ ID NO: 1237 - DNA, 60 bp, Artificial Sequence
  Probe
caaaagctcatccatttgcgttccatgatgctgggatttacacttgaggcttagctttgc

SEQ ID NO: 1238 - DNA, 60 bp, Artificial Sequence
  Probe
atatcagacactttccacctttgtttttggacagcccagtgctaaaagcactgaaggagg

SEQ ID NO: 1239 - DNA, 60 bp, Artificial Sequence
  Probe
ggatgggattgcaaaatgacagatttgaccagttttgggccatcaatcggaaactcatgg

SEQ ID NO: 1240 - DNA, 60 bp, Artificial Sequence
  Probe
cacagatccaggccacagaaagtgaaattcgttatgccacatggaagaaagccgtaatga

SEQ ID NO: 1241 - DNA, 60 bp, Artificial Sequence
  Probe
attggcattctttgtcttgtggttccttcccttatcttcaaagccagcaatagctaccgg

SEQ ID NO: 1242 - DNA, 60 bp, Artificial Sequence
  Probe
gaaaccttggatggaccagagggaatacctgggttctgaaaaactgagcatagtcactga

SEQ ID NO: 1243 - DNA, 60 bp, Artificial Sequence
  Probe
aaaatgagaatctggtttgctggggaagataaagggtgtcggaaaatggctgttgggtaa

SEQ ID NO: 1244 - DNA, 60 bp, Artificial Sequence
  Probe
gccaggatttgaaccaagtccaaagtcccaatactgggctttcaggaagggagaattatg

SEQ ID NO: 1245 - DNA, 60 bp, Artificial Sequence
  Probe
gcctgttagggctggaacagatctttatttgtctggaatgcttaagacctctcttcccct

SEQ ID NO: 1246 - DNA, 60 bp, Artificial Sequence
  Probe
atgccaattcaagagcctgggactcaatgtgagctcagccagaatcttcagaatctctat

SEQ ID NO: 1247 - DNA, 60 bp, Artificial Sequence
  Probe
gatgaaggagtaggacttgtgcattcaaacatagcaactgagcatattccaagccctgcc

SEQ ID NO: 1248 - DNA, 60 bp, Artificial Sequence
  Probe
tcagcagtgctgaggttgagacatcgcctctggttcctaaaagatcattgctcttatcag

SEQ ID NO: 1249 - DNA, 60 bp, Artificial Sequence
  Probe
gtttgtttctttgctgccgtgttccagttgctttatctgttcacttgtgccctgactttc

SEQ ID NO: 1250 - DNA, 60 bp, Artificial Sequence
  Probe
tttcatcatagtcagtccagtcctgggaaacaaaatggcattgttagcctcacaacgcag

SEQ ID NO: 1251 - DNA, 60 bp, Artificial Sequence
  Probe
atacctcaagaatgaacgccgaggaaacttcccccagtaaaaacatcaccattgctttcc

SEQ ID NO: 1252 - DNA, 60 bp, Artificial Sequence
  Probe
aagtttgtggctagggacatgccaatcccttctccagatgtgctgacttaaggagaataa

SEQ ID NO: 1253 - DNA, 60 bp, Artificial Sequence
  Probe
ggattcaccactgctaacacctcctggttggaactacaggaatagaactggaaagggaaa

SEQ ID NO: 1254 - DNA, 60 bp, Artificial Sequence
  Probe
gcaaagaaactgaaggcagagtcctaacgttgcatcttattcgagctggcagttctgttc

SEQ ID NO: 1255 - DNA, 60 bp, Artificial Sequence
  Probe
gaagaggagatccccaagctgtctacagatccttactggaaggtatggtgcaccaatttg

SEQ ID NO: 1256 - DNA, 60 bp, Artificial Sequence
  Probe
gtgattcagggtcatggtgaccctgatccagtttgggtggaaatccttcctaagtatcat

SEQ ID NO: 1257 - DNA, 60 bp, Artificial Sequence
  Probe
gaaagtgcagagtagatgagaacctttaaccaccaacattagggaggggtcccagacaaa

SEQ ID NO: 1258 - DNA, 60 bp, Artificial Sequence
  Probe
tgattggcataaatggatcgtgattcatcttaggttgtggctggggtctacttccttgga

SEQ ID NO: 1259 - DNA, 60 bp, Artificial Sequence
  Probe
ttctgattggtccatatagctgagctctgattggctgaggcaagtgaactctgattggtt

SEQ ID NO: 1260 - DNA, 60 bp, Artificial Sequence
  Probe
gacagggtcgctagactcggctggaattatatgtttctgttcatcacatggaaggcttga

SEQ ID NO: 1261 - DNA, 60 bp, Artificial Sequence
  Probe
gcctaagttgtttccaaggtagcaaggttttcccatactttgagcccctccccatttatc

SEQ ID NO: 1262 - DNA, 60 bp, Artificial Sequence
  Probe
gtgactaagtacatcctgattcctgcaagccagcagccaaaggagaataagacctctgaa

SEQ ID NO: 1263 - DNA, 60 bp, Artificial Sequence
  Probe
tgattctgagcccctgaggcaaaacgctttgcaggtaataattcagttttcccatctgag

SEQ ID NO: 1264 - DNA, 60 bp, Artificial Sequence
  Probe
atcacggacattactctgctgtcctttttctgacccgtcctcttggaggactcagtatat

SEQ ID NO: 1265 - DNA, 60 bp, Artificial Sequence
  Probe
ataataataaagagacaaaagaggccagccacccacctccaacacctcctgtgagtttct

SEQ ID NO: 1266 - DNA, 60 bp, Artificial Sequence
  Probe
acctaggtgagcccaatcattctgcagagcaatgtgcttcaatagtcttctggaaaccta

SEQ ID NO: 1267 - DNA, 60 bp, Artificial Sequence
  Probe
cctttcggcgagatacgtctaaccctgtgcaacagccactacattacttcaaactgagat

SEQ ID NO: 1268 - DNA, 60 bp, Artificial Sequence
  Probe
tcagagacacactcctcttccccgttctactctttcaacagataacttgcctctcacctt

SEQ ID NO: 1269 - DNA, 60 bp, Artificial Sequence
  Probe
caggaggggacgtagtatagggagcaggaagtaaataaagcaccagcaactcaacaactg

SEQ ID NO: 1270 - DNA, 60 bp, Artificial Sequence
  Probe
ccctgggaaatgcatatgaatgagttgtgtggttgaggaaggagaggcaaagtcaatgtt

SEQ ID NO: 1271 - DNA, 60 bp, Artificial Sequence
  Probe
accagcactccaggaaaggcaatgcattggaataaacaagatgaagcagtgagacttgaa

SEQ ID NO: 1272 - DNA, 60 bp, Artificial Sequence
  Probe
tgatgagaagcagttgtaactcttggtcctttgctgtcatctgtggtgaagtaggcagag

SEQ ID NO: 1273 - DNA, 60 bp, Artificial Sequence
  Probe
aaatgaaggacaaacaggacgaggagcagaggcttaaggaggaggaagaagacaagaaac

SEQ ID NO: 1274 - DNA, 60 bp, Artificial Sequence
  Probe
ctcattgagaacactaatgggcgactgatggcgaatccagaagctctgaagatcctttct

SEQ ID NO: 1275 - DNA, 60 bp, Artificial Sequence
  Probe
agagcttcatgacatccactctactcgctccaaagagcggctcaatgcatacacataaat

SEQ ID NO: 1276 - DNA, 60 bp, Artificial Sequence
  Probe
aagtgaatcagtgaagttggccagatatgagaccatggtgtggtgaggcctataagaacc

SEQ ID NO: 1277 - DNA, 60 bp, Artificial Sequence
  Probe
gcccctgaactttcagccgaatacatcttttccaaaggagtgaattcaggcccttgtatc

SEQ ID NO: 1278 - DNA, 60 bp, Artificial Sequence
  Probe
cggaaatccgaacgccagcagatctgaatggaatgttctggattgaagaaagtgggaaat

SEQ ID NO: 1279 - DNA, 60 bp, Artificial Sequence
  Probe
gtggagtttcgggctggacggtgattggctgaaacgaagaagtgtttagaaaatctcttg

SEQ ID NO: 1280 - DNA, 60 bp, Artificial Sequence
  Probe
ttctcacagtgatcattgggccatctagatcacctggggaggttgttaaaatgcagatga

SEQ ID NO: 1281 - DNA, 60 bp, Artificial Sequence
  Probe
gaactgggtgaagaatgtgtctcaagatggaaaaatgaatggctggtgctttagcctcca

SEQ ID NO: 1282 - DNA, 60 bp, Artificial Sequence
  Probe
aactagtactgatggtgaaacaggtccatcctacgttgatggcaactcggcaaattagct

SEQ ID NO: 1283 - DNA, 60 bp, Artificial Sequence
  Probe
aaaggcaggcttcaaccagccactccagctttgtgtcttctctcaattacatagcaattt

SEQ ID NO: 1284 - DNA, 60 bp, Artificial Sequence
  Probe
gacggttcctacacaggacaggggttccttctgggcattacatcgcatagaaatcaataa

SEQ ID NO: 1285 - DNA, 60 bp, Artificial Sequence
  Probe
gaagaccacagaccatggactagttctgaatggtttacagacctggcaaattttggtgcc

SEQ ID NO: 1286 - DNA, 60 bp, Artificial Sequence
  Probe
gagaaaaaccatgtttccagggaagaggtatctgcaaacgagataaggccaaagccacag

SEQ ID NO: 1287 - DNA, 60 bp, Artificial Sequence
  Probe
tagagttcttgaagattctcttggctgctggctgtgggtactttagggcatcatttcctt

SEQ ID NO: 1288 - DNA, 60 bp, Artificial Sequence
  Probe
aaatagcaagaaagtgtctctggcccaaagaggcacattcaatgagcttgaaggacagtg

SEQ ID NO: 1289 - DNA, 60 bp, Artificial Sequence
  Probe
gcccaggtactattgtgtccttgtccctgtgggtccttcactgtgtactctaacaaattc

SEQ ID NO: 1290 - DNA, 60 bp, Artificial Sequence
  Probe
cagctcaatggcagtgccaatgccctctttattctctatgtaagttacccctgggatact

SEQ ID NO: 1291 - DNA, 60 bp, Artificial Sequence
  Probe
tcccttttaccatcctgggcatgttggccttatgttctcattcttgtcattgcatggatc

SEQ ID NO: 1292 - DNA, 60 bp, Artificial Sequence
  Probe
acacttgtaatcatgtacacaactgggagtagtggggatgagtctgtggggaaaaacagg

SEQ ID NO: 1293 - DNA, 60 bp, Artificial Sequence
  Probe
gcaattaagtgcgaaagtatgtggcagcatctgctagctcaaagaagacagctagtgcag

SEQ ID NO: 1294 - DNA, 60 bp, Artificial Sequence
  Probe
caaatggttaccctgtgctgtacccaactggattgtcatcttctgagaatgcaaactgca

SEQ ID NO: 1295 - DNA, 60 bp, Artificial Sequence
  Probe
ttccacacgtagaaacccactgtgtttctctgggtgaagcactctctatgcaaggtttaa

SEQ ID NO: 1296 - DNA, 60 bp, Artificial Sequence
  Probe
ggaagagacaggaatgggaaggaggtagtggtaaccatgaacgttgctggaatattctgg

SEQ ID NO: 1297 - DNA, 60 bp, Artificial Sequence
  Probe
gagatacctcagtgcacagaagcctctcttgaatgatggccagttcaggtaaacactgag

SEQ ID NO: 1298 - DNA, 60 bp, Artificial Sequence
  Probe
gccaaaggtagaaacgtgatatggcaccattgagaacctataggaagtccagtgagcctt

SEQ ID NO: 1299 - DNA, 60 bp, Artificial Sequence
  Probe
agccccagagtctatgaatcaggtcactggagtacagtttctgtcaagttctcaggtgat

SEQ ID NO: 1300 - DNA, 60 bp, Artificial Sequence
  Probe
gacaccccttcctgccgccttactctgtacatagatttgcactctggagttttctgttag

SEQ ID NO: 1301 - DNA, 60 bp, Artificial Sequence
  Probe
gctgctgtgtaaaatccatgcgtggccaaagagaagtcaggggattatgacataaatggt

SEQ ID NO: 1302 - DNA, 60 bp, Artificial Sequence
  Probe
catgctagaagctcactctcttccagagtgtgaagcagattgaaaggggtgacaggattt

SEQ ID NO: 1303 - DNA, 60 bp, Artificial Sequence
  Probe
ggggtaaacctggaatttcgcgagctatccaaaagcacatgcattgttctaagtcctctg

SEQ ID NO: 1304 - DNA, 60 bp, Artificial Sequence
  Probe
actgtccagggaagactagactcactcatgaagtgttaagttccccatcagtagagcgtg

SEQ ID NO: 1305 - DNA, 60 bp, Artificial Sequence
  Probe
gtattccctgcttcagccagttttcagctttcttaggtctgctctgtcagttaccactca

SEQ ID NO: 1306 - DNA, 60 bp, Artificial Sequence
  Probe
tctgtgttagtctggagggtgaacctattttaatgcaggagggcatagacttttgggtgg

SEQ ID NO: 1307 - DNA, 60 bp, Artificial Sequence
  Probe
aaggtgaaattcgatgctactgtgatgctgcccactgtgtagccactggttatatgtgta

SEQ ID NO: 1308 - DNA, 60 bp, Artificial Sequence
  Probe
ggaacctccagtctcagcaccatgaatcaaactgccattctgatttgctgccttatcttt

SEQ ID NO: 1309 - DNA, 60 bp, Artificial Sequence
  Probe
gaccaaccttccattcacaccagctaaggagtccctggttcattgatggatgtcttctag

SEQ ID NO: 1310 - DNA, 60 bp, Artificial Sequence
  Probe
aatcagccacttatatctggaagaacaacttccacgaaaagggtcccggtgagacagatg

SEQ ID NO: 1311 - DNA, 60 bp, Artificial Sequence
  Probe
ttcctactggatgttctctcaataattgtgctgcccattatactcccaatgccggtgaca

SEQ ID NO: 1312 - DNA, 60 bp, Artificial Sequence
  Probe
attgcaaagttgggaggagacagcagaaaaggtcattgcaacctgtttctgctctacttt

SEQ ID NO: 1313 - DNA, 60 bp, Artificial Sequence
  Probe
gtctgcatgtctcttccttccggtactctgtcttatgaaatctggctgacttggtttccc

SEQ ID NO: 1314 - DNA, 60 bp, Artificial Sequence
  Probe
ccctcccacatttctgctgtgtgccaacttggaaactttcttcaagattctcaactgtca

SEQ ID NO: 1315 - DNA, 60 bp, Artificial Sequence
  Probe
gactccttagcttagtgaggccattggtccttgtttgaactctgtcttccacacctcaat

SEQ ID NO: 1316 - DNA, 60 bp, Artificial Sequence
  Probe
cctgagcaccagacatgtatgtatatcaagatgcctgcaggtcatatccaccaggacaac

SEQ ID NO: 1317 - DNA, 60 bp, Artificial Sequence
  Probe
ccagagcgtcagtactgagaggacactaagcatgtgaccttcactactcctgttctgaat

SEQ ID NO: 1318 - DNA, 60 bp, Artificial Sequence
  Probe
aattttccatgcatttccattcagcggatccgagccacagtaaatagccaggaacagaaa

SEQ ID NO: 1319 - DNA, 60 bp, Artificial Sequence
  Probe
ttataagaatcacgtgtccagaacactctgattcacagccaaggatccagaaggccaagg

SEQ ID NO: 1320 - DNA, 60 bp, Artificial Sequence
  Probe
tcctctacccaggtctccggtgtgcatttgggcgtcttatcctcataaagtatatagctt

SEQ ID NO: 1321 - DNA, 60 bp, Artificial Sequence
  Probe
tgcagagcgcacgtgttggattctgcctggtaagagtttttcccatatgatagcaaaaaa

SEQ ID NO: 1322 - DNA, 60 bp, Artificial Sequence
  Probe
caagtgtaggaggactaacaggcactgtagcaaactaaagagccctgaataaatggggct

SEQ ID NO: 1323 - DNA, 60 bp, Artificial Sequence
  Probe
gtcacattctgctgttggggaaactgaggcacagaaaatggtagggatttcattcacgag

SEQ ID NO: 1324 - DNA, 60 bp, Artificial Sequence
  Probe
caaagtcccttgagcgcttggtatttggatctctcattaccacgcaatccatgagcattc

SEQ ID NO: 1325 - DNA, 60 bp, Artificial Sequence
  Probe
tcaggtggccaactatggatttctttcctctctgtgcctcaataaaatagaggccaggac

SEQ ID NO: 1326 - DNA, 60 bp, Artificial Sequence
  Probe
gttcagagtgagagagttggaatcttctttctcagaagcacacgtcactggccatggaat

SEQ ID NO: 1327 - DNA, 60 bp, Artificial Sequence
  Probe
tccccatttcatgagaggggatgactgtacacacgtcagtgtgtattaggccatcaaaac

SEQ ID NO: 1328 - DNA, 60 bp, Artificial Sequence
  Probe
gttgcctttctgagggatttctgctcaatgcaatacactgttcagtgctattctcccagc

SEQ ID NO: 1329 - DNA, 60 bp, Artificial Sequence
  Probe
ttcttacatccagagaggttctgccaggagccaaatgtgattataccatacaggtgcagc

SEQ ID NO: 1330 - DNA, 60 bp, Artificial Sequence
  Probe
attgcttcagttctaacaggccgcaaaactgataccgcttttcgggaaatacacgaaaca

SEQ ID NO: 1331 - DNA, 60 bp, Artificial Sequence
  Probe
ttctgctgtataggcaaaagcagaaggtaagaatgttctgggcagtgggaaatgcatgtg

SEQ ID NO: 1332 - DNA, 60 bp, Artificial Sequence
  Probe
aatttcttttccctggacatcatacctgctgctgaaatccaacaggatgcttgctttcct

SEQ ID NO: 1333 - DNA, 60 bp, Artificial Sequence
  Probe
ttatagccagactggacttgtgtatctgctgtgatcacacacacccgtttcaccattctg

SEQ ID NO: 1334 - DNA, 60 bp, Artificial Sequence
  Probe
cctctcctgtaaaatggggatgctggcaataatagagatttgaacctaggtggtgtgggt

SEQ ID NO: 1335 - DNA, 60 bp, Artificial Sequence
  Probe
cagggctaaggtagggagctctgatggtagcatttgctggtttctgtggtgtaaatactt

SEQ ID NO: 1336 - DNA, 60 bp, Artificial Sequence
  Probe
tgccttcccggtatgccctatttctctctgtgtgtagtctttgcttagctgttcacattc

SEQ ID NO: 1337 - DNA, 60 bp, Artificial Sequence
  Probe
ctgaggatgggtctgaggaattcgagaccatagttttgaaggcccttgtgaagggtaaaa

SEQ ID NO: 1338 - DNA, 60 bp, Artificial Sequence
  Probe
ggatttgtttatttcctgtcttccccctgatggattgtgagttccatgaggacaggggta

SEQ ID NO: 1339 - DNA, 60 bp, Artificial Sequence
  Probe
acctcagtcttcccatctttaaaatggggtggttactgggaaggcagagaaggaagaaag

SEQ ID NO: 1340 - DNA, 60 bp, Artificial Sequence
  Probe
gacgtcttggataagtgcatggaggaggaactgttgacaattgaagacagaaaccgggta

SEQ ID NO: 1341 - DNA, 60 bp, Artificial Sequence
  Probe
gttttacagatgtgaaaaagcaggcactgagaggtaaggtaatttgcccaaggtcacgca

SEQ ID NO: 1342 - DNA, 60 bp, Artificial Sequence
  Probe
ccagaaagattcagagttggccaagaatgaacattggctaccagaccacaagtcagcatg

SEQ ID NO: 1343 - DNA, 60 bp, Artificial Sequence
  Probe
tccttgtgcaaaccactatgaagcgtctcctagcacatcgatccctcactgaaattcttc

SEQ ID NO: 1344 - DNA, 60 bp, Artificial Sequence
  Probe
catgactgcttctagagctgggaggatctgcagactttcacggattcatggaacaagaaa

SEQ ID NO: 1345 - DNA, 60 bp, Artificial Sequence
  Probe
tgcaaaatcgaggacattgataacgaagattgggagaaccctcagctctgcagtgactac

SEQ ID NO: 1346 - DNA, 60 bp, Artificial Sequence
  Probe
gctggatttttgcacatccaaagatactgctccctgaagcagccacttaacaagtgagaa

SEQ ID NO: 1347 - DNA, 60 bp, Artificial Sequence
  Probe
gacaacaaatgtaagtgtgcccggattacttccaggatcatccgttcttccgaagatcct

SEQ ID NO: 1348 - DNA, 60 bp, Artificial Sequence
  Probe
ttgtgccctattacttaaccttgagggacatagagagcatgagacaccaaggggcttttg

SEQ ID NO: 1349 - DNA, 60 bp, Artificial Sequence
  Probe
ttcctcacgttactcatataattaccgtgtgatcgtgtggtgctctgctgcttgttggtc

SEQ ID NO: 1350 - DNA, 60 bp, Artificial Sequence
  Probe
tcaaagtccaatcacggtgactcagttcccaagtatgagatgagtgtttctgttgccaca

SEQ ID NO: 1351 - DNA, 60 bp, Artificial Sequence
  Probe
ccacgctcacaaccctccagtgatttccatctcactccaaagtaaaagaccaagtcctta

SEQ ID NO: 1352 - DNA, 60 bp, Artificial Sequence
  Probe
caacgtgaaaactggttaaatcaagcgcaccctcccaccctcgttttagatgaggaattt

SEQ ID NO: 1353 - DNA, 60 bp, Artificial Sequence
  Probe
tgagaggtatttaacatgtcagtgggaaggaatttctattcactgcagtgggctgtcccc

SEQ ID NO: 1354 - DNA, 60 bp, Artificial Sequence
  Probe
ggacttcaatttcttcacctctaaaatgggggacttggaccaggtagattgctgagctca

SEQ ID NO: 1355 - DNA, 60 bp, Artificial Sequence
  Probe
cattgactttgtggtggcaacacagtcagttctagacagctttgctgggaggaaaatcaa

SEQ ID NO: 1356 - DNA, 60 bp, Artificial Sequence
  Probe
ttgaccacgagtcttcttctgtaggtcttgtgtccctgtctcctgtggtgactaatttca

SEQ ID NO: 1357 - DNA, 60 bp, Artificial Sequence
  Probe
atgtctccaggggcaccaaagaatgcattttccacgtttgtccctaaacgttaatgcata

SEQ ID NO: 1358 - DNA, 60 bp, Artificial Sequence
  Probe
gtcaggccctaccattgaggaggtggattaggggcctttgttctttagtatgtttgtctt

SEQ ID NO: 1359 - DNA, 60 bp, Artificial Sequence
  Probe
ccagtttccctggtgtaaatattcccatggtggctgatttcaagctgtcgttgtgatgtc

SEQ ID NO: 1360 - DNA, 60 bp, Artificial Sequence
  Probe
taagctgatgtttgatttaattgtgagttcctggggcctccaggcctccttcatctgtaa

SEQ ID NO: 1361 - DNA, 60 bp, Artificial Sequence
  Probe
cattttgggacattctaatccctgagcccctattattttcatcatgggcttctgcctggc

SEQ ID NO: 1362 - DNA, 60 bp, Artificial Sequence
  Probe
tggtgatgtgattggcgtcaattcattgagggtgactgatggaatctcctttgcaattcc

SEQ ID NO: 1363 - DNA, 60 bp, Artificial Sequence
  Probe
agctggaacattgttacagcaggctttttgttgctcatgggcagatagagggaaagaatc

SEQ ID NO: 1364 - DNA, 60 bp, Artificial Sequence
  Probe
tgccatgctgaaacagtatgccgacaagcttgaatttatgcacattcttacccgggttaa

SEQ ID NO: 1365 - DNA, 60 bp, Artificial Sequence
  Probe
catggctagcccaagaatccgacatttcccccatttcacagacgagcaaattgaagttag

SEQ ID NO: 1366 - DNA, 60 bp, Artificial Sequence
  Probe
tttccacatggttagttgatctgatgtttctgccaggggcatgagttttggagagtccta

SEQ ID NO: 1367 - DNA, 60 bp, Artificial Sequence
  Probe
ccaaccatgctttacagagagagtttcctcaccttggggtgttttcaagtctgtcaccta

SEQ ID NO: 1368 - DNA, 60 bp, Artificial Sequence
  Probe
ctgggagcatgagggtagataagctggatggacaaatacgttatgcactggtgtatgcaa

SEQ ID NO: 1369 - DNA, 60 bp, Artificial Sequence
  Probe
ccgtgtctattggcaggaactgcttgatttgcacatggaaatgggactaagcattgaaga

SEQ ID NO: 1370 - DNA, 60 bp, Artificial Sequence
  Probe
cattcagtgggtgcaggcacaataaatgccttgctggattgcctattagaggatgaagtt

SEQ ID NO: 1371 - DNA, 60 bp, Artificial Sequence
  Probe
gaccagtgaaattggagcagaggaagctgaggaagttggagttgaacacttgttacgaga

SEQ ID NO: 1372 - DNA, 60 bp, Artificial Sequence
  Probe
cttgtccactttgggctccagagtctttcagatgtactaagctgctgacatcatccactg

SEQ ID NO: 1373 - DNA, 60 bp, Artificial Sequence
  Probe
tctaacccaagagtcagagatggggctggtcatgttcctttggtttgaataactcccttg

SEQ ID NO: 1374 - DNA, 60 bp, Artificial Sequence
  Probe
agaattaggtgatagaggctacatccaggagctgcccatggcaggattgtatctcctatc

SEQ ID NO: 1375 - DNA, 60 bp, Artificial Sequence
  Probe
atttcaaacgccacttccaccagaaggccttgctactgcaccaactagttactatctctt

SEQ ID NO: 1376 - DNA, 60 bp, Artificial Sequence
  Probe
tcatattcacctagggccatgtgcttacctagttaaatgcttttcctgcaccactggaca

SEQ ID NO: 1377 - DNA, 60 bp, Artificial Sequence
  Probe
cattgactctgcaaaatactgccacttagctggcactgtgatggagtcttcagtagtcca

SEQ ID NO: 1378 - DNA, 60 bp, Artificial Sequence
  Probe
tgatcagcctactgcctcctttcccaataaggtcatgttcttctcttcctctgctcctat

SEQ ID NO: 1379 - DNA, 60 bp, Artificial Sequence
  Probe
ttctcttcctctgtcccccaaatactgttcaggcactatttctcctcctgtacttccctc

SEQ ID NO: 1380 - DNA, 60 bp, Artificial Sequence
  Probe
aagacaagcaaaactgatgtgcactttatggcttgggactgatttgggggacattgtaca

SEQ ID NO: 1381 - DNA, 60 bp, Artificial Sequence
  Probe
aataaacttgtggttgtcctttaactggaggtcccagcacatgtgttttcaagaggccac

SEQ ID NO: 1382 - DNA, 60 bp, Artificial Sequence
  Probe
gttactgtggtttcactaaaagctaccgtggtggagtgaagtcagtcagggaaggtttgt

SEQ ID NO: 1383 - DNA, 60 bp, Artificial Sequence
  Probe
tgtgtgtaccaatgcgggctggggcattttcgagaaattacacattccttttacactctg

SEQ ID NO: 1384 - DNA, 60 bp, Artificial Sequence
  Probe
cctgtctgactcctacatgtcctgtaggtctcaggttagacctcaatttctgcaacacct

SEQ ID NO: 1385 - DNA, 60 bp, Artificial Sequence
  Probe
gacctttgctctgaatgacatggggagttagaggacagttttggaaagtgggacatggta

SEQ ID NO: 1386 - DNA, 60 bp, Artificial Sequence
  Probe
cgcatccgggaaggagtagaatcagcaattctagttttggatatgttgtctgaggagccc

SEQ ID NO: 1387 - DNA, 60 bp, Artificial Sequence
  Probe
gctccatcgatcccttcacatttgtctcctggtttacgagatgtggctcttcgttgttta

SEQ ID NO: 1388 - DNA, 60 bp, Artificial Sequence
  Probe
gcaatgatcaacaaagcctgagtgatcttggccctaactcctctcatcttccctaactcc

SEQ ID NO: 1389 - DNA, 60 bp, Artificial Sequence
  Probe
agagcaagagaaattgggtgatatctgcttctcccttcgctacgtacctactgctggtaa

SEQ ID NO: 1390 - DNA, 60 bp, Artificial Sequence
  Probe
ctaagcatccacttcttcagggaccctcaaggggtgatacgtcattatgttgtgtgttcc

SEQ ID NO: 1391 - DNA, 60 bp, Artificial Sequence
  Probe
tgatgaggtgtccctcatcctctcttagctgaaaatcagcagctgcctcaacttcttttc

SEQ ID NO: 1392 - DNA, 60 bp, Artificial Sequence
  Probe
ccttactccctccttctgttgtacctaatgtccatgagtcccgagtctctgcttcagttt

SEQ ID NO: 1393 - DNA, 60 bp, Artificial Sequence
  Probe
ttttcactgagttgaagccacagcattttctgagaaatggagaggacacccgttctttgc

SEQ ID NO: 1394 - DNA, 60 bp, Artificial Sequence
  Probe
ctgaagtcttgactgactcagtacctgcccctccctccatctctgaaatgtggagaatta

SEQ ID NO: 1395 - DNA, 60 bp, Artificial Sequence
  Probe
tcaggagatagcttgagaatgcaatttttagggcctccttggagagcaatgggaagagac

SEQ ID NO: 1396 - DNA, 60 bp, Artificial Sequence
  Probe
aatccatccccaaaaccaacccaatggtttgtttccagatgtatcagatggcagtccaat

SEQ ID NO: 1397 - DNA, 60 bp, Artificial Sequence
  Probe
atcagtatggaggagtttgtgtagccagctgtccccataactttgtggtggatcaaacat

SEQ ID NO: 1398 - DNA, 60 bp, Artificial Sequence
  Probe
aaaagagatgagccgaagtggggttcagataatgcacgtgtttcgaatcccactgtgata

SEQ ID NO: 1399 - DNA, 60 bp, Artificial Sequence
  Probe
tggaacaagaagagagattccaacctcgagaaaaagggctgagtttgattgaggctaccc

SEQ ID NO: 1400 - DNA, 60 bp, Artificial Sequence
  Probe
ggggaagggaatggaatagggttaggaatgaggttggagatgggatggaaagatggaaag

SEQ ID NO: 1401 - DNA, 60 bp, Artificial Sequence
  Probe
cgcttaccccatgtttcccaaatgaggaatccaaggccaagaagaagggaaaggatttac

SEQ ID NO: 1402 - DNA, 60 bp, Artificial Sequence
  Probe
gcatatacagtgttctccagctgacttatctcggagactggtcctgtcagccgttaaaga

SEQ ID NO: 1403 - DNA, 60 bp, Artificial Sequence
  Probe
ggcagagggatgagaatcttcgtagaccatacaaacccagccccacattgttatgtaagg

SEQ ID NO: 1404 - DNA, 60 bp, Artificial Sequence
  Probe
gcagatattgggaaagagaaggggtagtgagtaatcatgaatggcgagggtcttgaaggc

SEQ ID NO: 1405 - DNA, 60 bp, Artificial Sequence
  Probe
agctaaggattggaatgacaacccccggaaaaatttcgggttattcctggagatactggt

SEQ ID NO: 1406 - DNA, 60 bp, Artificial Sequence
  Probe
tctgaggatagcactgtggttctgtgacagataatgaaggatttggaagcaggaatgccc

SEQ ID NO: 1407 - DNA, 60 bp, Artificial Sequence
  Probe
aagcacaccttttgacaatgagttctacaatggactctgtaaccgggatcgggatggaaa

SEQ ID NO: 1408 - DNA, 60 bp, Artificial Sequence
  Probe
gaaggagctcttccatgaagccagagaaagggcttccaaagcacttggatttgctaaaat

SEQ ID NO: 1409 - DNA, 60 bp, Artificial Sequence
  Probe
gcaggatcccaatgtacaggtggatcatctgaatctcctgaaacagtttgaacacctgga

SEQ ID NO: 1410 - DNA, 60 bp, Artificial Sequence
  Probe
taattcgtggtcttacagccttccaaaataactccagttgggcacccatgagctaggatc

SEQ ID NO: 1411 - DNA, 60 bp, Artificial Sequence
  Probe
tgaagtaacctgccaattcccaatcaaaaacacatcctttcaacatctgccctgtgtcca

SEQ ID NO: 1412 - DNA, 60 bp, Artificial Sequence
  Probe
ttctctctctcagctttgtctctctctcttcccttctgactcagtctctcacactcgtcc

SEQ ID NO: 1413 - DNA, 60 bp, Artificial Sequence
  Probe
ttagtcttttcccacttctactgcctacaatacccaatcagttccttcccaccccaatgc

SEQ ID NO: 1414 - DNA, 60 bp, Artificial Sequence
  Probe
tctgaaagaggagatctgcataaatgagaaaatcgggaaaggcgttctggaatgggtggt

SEQ ID NO: 1415 - DNA, 60 bp, Artificial Sequence
  Probe
gcatctgctccaaaactgctttgagttactcagaacttcaacctcccaatgcactgaagg

SEQ ID NO: 1416 - DNA, 60 bp, Artificial Sequence
  Probe
agagcaagcaagtgcagtgtttattaaccaaggtgtggtgtggtattgtgaacgagcttg

SEQ ID NO: 1417 - DNA, 60 bp, Artificial Sequence
  Probe
cagggcaccccaacatcatacagctgaaggacacttatgagaccaacactttcttcttct

SEQ ID NO: 1418 - DNA, 60 bp, Artificial Sequence
  Probe
gagtccatttagcccagtgggaaagtcttggaactcaggttacccttgaaggatatgctg

SEQ ID NO: 1419 - DNA, 60 bp, Artificial Sequence
  Probe
tcttgctgctgaaccacgggtttctcctctgaaacatctgggatttataacagggcttag

SEQ ID NO: 1420 - DNA, 60 bp, Artificial Sequence
  Probe
ggcttccacgcaagcataatctagctttgtggttcctcataggacacatgcagaaaatgg

SEQ ID NO: 1421 - DNA, 60 bp, Artificial Sequence
  Probe
aaaactccgatctgcctttgttccatgacaaaggagagattatcacgtgccctactggac

SEQ ID NO: 1422 - DNA, 60 bp, Artificial Sequence
  Probe
gtagagactggtgtgaggttagatgtatgctgaaacctctgtgtggggaaagaagggaga

SEQ ID NO: 1423 - DNA, 60 bp, Artificial Sequence
  Probe
gaatgggcaaagaagtggggaatctgctactggaaaactcacagcttctggaaaccaaaa

SEQ ID NO: 1424 - DNA, 60 bp, Artificial Sequence
  Probe
aagctgcttttcaccaaattgcaatggagcctttcgaaatcaatgttccaaagcccaaga

SEQ ID NO: 1425 - DNA, 60 bp, Artificial Sequence
  Probe
cttcacagaaatgggtgggaaggggctcttgattgagatagaagcccatcctacatgaag

SEQ ID NO: 1426 - DNA, 60 bp, Artificial Sequence
  Probe
gcagacacaaagacagttcataccctcttgtaggtttttctccaaggacctccagcagtt

SEQ ID NO: 1427 - DNA, 60 bp, Artificial Sequence
  Probe
tttgctcagcccaaccctaaccctaactcctaccagccaattcaaggtgatgattagatg

SEQ ID NO: 1428 - DNA, 60 bp, Artificial Sequence
  Probe
agtgctctccttattctcctcctgcaggtcggtgagctggtaaaggttacgaagattaat

SEQ ID NO: 1429 - DNA, 60 bp, Artificial Sequence
  Probe
gctttctgttgctagattggtggttgggaaatgccaggtctggattgtcttcttctgttg

SEQ ID NO: 1430 - DNA, 60 bp, Artificial Sequence
  Probe
atatggagctctcattcaaggtgtggatgtgtggtggtgaaattgagatcattccctgct

SEQ ID NO: 1431 - DNA, 60 bp, Artificial Sequence
  Probe
ggcaggaacagttctttagctgtcggcgtaaatgaccaagttcatgacctatcaaggtct

SEQ ID NO: 1432 - DNA, 60 bp, Artificial Sequence
  Probe
cacaattccacctgcatctgcatgatctcttccttccacctggtctcagtggagaaatag

SEQ ID NO: 1433 - DNA, 60 bp, Artificial Sequence
  Probe
accaagagcagagacagagagcaaggaccgaaactgcttcttcatgacaccaaaatacaa

SEQ ID NO: 1434 - DNA, 60 bp, Artificial Sequence
  Probe
tgtctgtgctaggatatagaacttggagaatggagccttgggatggattccagcctaact

SEQ ID NO: 1435 - DNA, 60 bp, Artificial Sequence
  Probe
ctgtggggtcatgattgagtttgaatcctgactccaccgcttagtagctgtgtcatcttg

SEQ ID NO: 1436 - DNA, 60 bp, Artificial Sequence
  Probe
acagcttcagcgatgtcagattttttatgtaaatggtgccttcacatgctctggggcatt

SEQ ID NO: 1437 - DNA, 60 bp, Artificial Sequence
  Probe
atttggaaaaggctgcagcattttataagaatattctgggggcccaggtaagtgaagcgg

SEQ ID NO: 1438 - DNA, 60 bp, Artificial Sequence
  Probe
acaaccaagaacttttccccaccaggagtgggtatatttcaacttctgtaatccctgcgt

SEQ ID NO: 1439 - DNA, 60 bp, Artificial Sequence
  Probe
tttaagcacatggactgtggagctggacagactagatttgaattccggctctgacacttg

SEQ ID NO: 1440 - DNA, 60 bp, Artificial Sequence
  Probe
tggtatttggccatctccattctgagcaccaaacggttaacacgaatgtccactagaact

SEQ ID NO: 1441 - DNA, 60 bp, Artificial Sequence
  Probe
ggtacaacacgcctcctgaaagggtctgatagctttcagtagcagtaagacacttgcatg

SEQ ID NO: 1442 - DNA, 60 bp, Artificial Sequence
  Probe
gctcaccattgtatcttcttttccaggttgtccaataactgcatcacctacctaggggca

SEQ ID NO: 1443 - DNA, 60 bp, Artificial Sequence
  Probe
tgttcactggacctgcatcttaactctgaggctggcattgttaaacacctgtagtactgc

SEQ ID NO: 1444 - DNA, 60 bp, Artificial Sequence
  Probe
acctctaatttgtttcctgattcccagtaccggcttggacattcatccctttcctagcac

SEQ ID NO: 1445 - DNA, 60 bp, Artificial Sequence
  Probe
gttgttgacaaaaacgaaaagagcaactggctctgggctagtgggggaagaaagaaatca

SEQ ID NO: 1446 - DNA, 60 bp, Artificial Sequence
  Probe
ttgttcaccattgcatcctcggtgctgagcactgcgtctgacatattatttagaaggtca

SEQ ID NO: 1447 - DNA, 60 bp, Artificial Sequence
  Probe
gagttggtgatagcctgagcaaggaaatccttgtctaggactttgtgtgtgcctcatgaa

SEQ ID NO: 1448 - DNA, 60 bp, Artificial Sequence
  Probe
cagagcattgcccttaagcacgaagggcactaattagctatcacaccacgaagagtacag

SEQ ID NO: 1449 - DNA, 60 bp, Artificial Sequence
  Probe
atggaaacaaaggctgcaatggtggcttcatgacaacggctttccagtacatcattgata

SEQ ID NO: 1450 - DNA, 60 bp, Artificial Sequence
  Probe
ggggaaaacaagctgctcgagctttatttcttcggtgcaaccaactcagaatgaattcct

SEQ ID NO: 1451 - DNA, 60 bp, Artificial Sequence
  Probe
acttagttccacctgcagagattctcatttaattggcatgggctatgacctggactgtgg

SEQ ID NO: 1452 - DNA, 60 bp, Artificial Sequence
  Probe
cagtatgtcttctcctatctctatctcccctccaaattctccaccctcacttgcagcctg

SEQ ID NO: 1453 - DNA, 60 bp, Artificial Sequence
  Probe
ttcagtccacacttctagtaggttgagttcagcccaagattaaggctctggtctggagtc

SEQ ID NO: 1454 - DNA, 60 bp, Artificial Sequence
  Probe
agctggcctgttactcttagggaactatcttatgtgtggcatttcctttgcagttgggaa

SEQ ID NO: 1455 - DNA, 60 bp, Artificial Sequence
  Probe
cagaagattggctttgggtttctagtgatgctctgttgtctccaccagatggcgttatct

SEQ ID NO: 1456 - DNA, 60 bp, Artificial Sequence
  Probe
gtgacccgttatgttttagcttagtgcatgcactaggaggtcaccatcagtgtttgacct

SEQ ID NO: 1457 - DNA, 60 bp, Artificial Sequence
  Probe
gctgatatgtgcctgtttctggacaatggaggcgaaagagtggaatttcattcaaaggca

SEQ ID NO: 1458 - DNA, 60 bp, Artificial Sequence
  Probe
cacctacagagatggcttcaacgtctccatcatgtataacctcactgttctgggtctgga

SEQ ID NO: 1459 - DNA, 60 bp, Artificial Sequence
  Probe
ttggcttcactagaatccccagttcttcccctctctacagttttgtctctgaggtcacaa

SEQ ID NO: 1460 - DNA, 60 bp, Artificial Sequence
  Probe
cacatgtggtgaagtcatagttaaaggagccactagtgcagaacctgggtcatcaaacca

SEQ ID NO: 1461 - DNA, 60 bp, Artificial Sequence
  Probe
atcacggcaagccttcttttagggtgtcacctcatccctttaagagctgtcatcaaatca

SEQ ID NO: 1462 - DNA, 60 bp, Artificial Sequence
  Probe
acttggtttctttgctcagagccgtgtcccatttaggaaagtactaggagtttggggttc

SEQ ID NO: 1463 - DNA, 60 bp, Artificial Sequence
  Probe
acaccattcctcatagtctacaggaaatcaggtggggaaagcaaagtcaggaaatggcat

SEQ ID NO: 1464 - DNA, 60 bp, Artificial Sequence
  Probe
ctgccaacacactgtgtcattttgcccaagttgctttctgtctctggacttccttttaca

SEQ ID NO: 1465 - DNA, 60 bp, Artificial Sequence
  Probe
ctatgaatgtgaagtgagcttggccaacctgctcttcctccagagtgtttcatatcagca

SEQ ID NO: 1466 - DNA, 60 bp, Artificial Sequence
  Probe
tgttagcgaagaaaacagaagccaccaacaagcctatctgtcctttgcaattttgctcca

SEQ ID NO: 1467 - DNA, 60 bp, Artificial Sequence
  Probe
agagagagagagtcccctttcctttcactttctccctccaaaacagctgcctaaagagat

SEQ ID NO: 1468 - DNA, 60 bp, Artificial Sequence
  Probe
caggtgaaaaagatgaggcacagagaggctgagtaacttgtcttaggtcacacagccaag

SEQ ID NO: 1469 - DNA, 60 bp, Artificial Sequence
  Probe
ccaatccccttttcatctcccctgaaattctattcgctccgcacttgtcttcattctcga

SEQ ID NO: 1470 - DNA, 60 bp, Artificial Sequence
  Probe
tgtcttcactcctgggaggagtccatttttgttaattttctcagtgactgggaagggctg

SEQ ID NO: 1471 - DNA, 60 bp, Artificial Sequence
  Probe
aagggaaagggcgttcctcaactgagaagtgaagattcttctctgctagatagtacgggg

SEQ ID NO: 1472 - DNA, 60 bp, Artificial Sequence
  Probe
tttctccatcatgaaggtgtagatatgagcggtagtattgctgttgctggtggtgtgtgc

SEQ ID NO: 1473 - DNA, 60 bp, Artificial Sequence
  Probe
tgactcacaggtcctgacaatttgactctggggaaatacaggtcctgactcacagatcat

SEQ ID NO: 1474 - DNA, 60 bp, Artificial Sequence
  Probe
tggaagttgcaaattcctaatttggcagcctgcagctgtgatccatagaagggaatgttt

SEQ ID NO: 1475 - DNA, 60 bp, Artificial Sequence
  Probe
caaaggattagtcataggaaatggtggtgggaggaggaggtggaaggcaaagaaaaggaa

SEQ ID NO: 1476 - DNA, 60 bp, Artificial Sequence
  Probe
tacgtagcttagaggctacagactctgcctttgataaccctgattactggcatagcaggc

SEQ ID NO: 1477 - DNA, 60 bp, Artificial Sequence
  Probe
agaccatctcctccctaatgagtttgcatcgctgatcttcagtaccttcacctgtctcag

SEQ ID NO: 1478 - DNA, 60 bp, Artificial Sequence
  Probe
aggggattctactctgtgcctcctgactatgtctggctaagagattcgccttaaatgctc

SEQ ID NO: 1479 - DNA, 60 bp, Artificial Sequence
  Probe
tgagaaccagaacaccgaatgtagtttcagtccaaaggccagtaggctcaagatctagga

SEQ ID NO: 1480 - DNA, 60 bp, Artificial Sequence
  Probe
gccttagactgacagggacacactttgttctactaccactcatggactgtctctagccac

SEQ ID NO: 1481 - DNA, 60 bp, Artificial Sequence
  Probe
gaacgtgctaccggcacagtgagtgttttaagctgaaggaatttgagaaaaccgcagaag

SEQ ID NO: 1482 - DNA, 60 bp, Artificial Sequence
  Probe
gacctgcatcactctcactttaactgcaacttcgctccgtactttacacactgggacaaa

SEQ ID NO: 1483 - DNA, 60 bp, Artificial Sequence
  Probe
ccatggcaatttttgagttgttggattacatagtcaacgagcctcctccaaaactgccca

SEQ ID NO: 1484 - DNA, 60 bp, Artificial Sequence
  Probe
ggggcagacccttttcataactccctcaagtgtgtgttacctttctttaccagcatggta

SEQ ID NO: 1485 - DNA, 60 bp, Artificial Sequence
  Probe
gagaaggtcggaccagccttctgatctacagtcgcctgtgtacctttgtactttctacag

SEQ ID NO: 1486 - DNA, 60 bp, Artificial Sequence
  Probe
ttcccaggtacattcaagctcacaatacctttccagctgctccctgattagaaaactgca

SEQ ID NO: 1487 - DNA, 60 bp, Artificial Sequence
  Probe
agggatatcaggatggggtttctcgtgggaggtttggtgatcctgatagttaagttccat

SEQ ID NO: 1488 - DNA, 60 bp, Artificial Sequence
  Probe
tgggattgtacctactgaaatacagtaggtaaccctgtgagggtcctggctttcatgagg

SEQ ID NO: 1489 - DNA, 60 bp, Artificial Sequence
  Probe
aatgcattaaccagcaagtgtggccaaggataatgaaaaagtgggaaaggaaggtcctcc

SEQ ID NO: 1490 - DNA, 60 bp, Artificial Sequence
  Probe
ttatggctacacgagctttgacactttcagctgggccttcttagccttgtttaggctaat

SEQ ID NO: 1491 - DNA, 60 bp, Artificial Sequence
  Probe
ctcagattgaacacttaccagagtgtcagggcttctgtaccctgggttagaatcagacca

SEQ ID NO: 1492 - DNA, 60 bp, Artificial Sequence
  Probe
tttctgtggtgtttcctcccttgtattttgtggtgttggtccccctaacaggtctttgta

SEQ ID NO: 1493 - DNA, 60 bp, Artificial Sequence
  Probe
tgcaccaagaactctgacccatggtttcttgccccaaagcagaaaaaaagtaactgatgt

SEQ ID NO: 1494 - DNA, 60 bp, Artificial Sequence
  Probe
atttcgcctatagcatgctgaactggagttgcagcagatgtcaaggtagaatccatggag

SEQ ID NO: 1495 - DNA, 60 bp, Artificial Sequence
  Probe
tcttactcatcatcttatgctgttactgtctccgcaactggaaccaacggtcctcgagag

SEQ ID NO: 1496 - DNA, 60 bp, Artificial Sequence
  Probe
gaaattttagttggcttctcctttggcaagctcagtcctttgtctgtgtcctgacttggc

SEQ ID NO: 1497 - DNA, 60 bp, Artificial Sequence
  Probe
gaaaatggagccatgacaagaacaaagccactgactgagatggagtgagctgagacagat

SEQ ID NO: 1498 - DNA, 60 bp, Artificial Sequence
  Probe
tccattatgcttctcctctctgagaatcctgacttacctcaacaacggagacatggcaca

SEQ ID NO: 1499 - DNA, 60 bp, Artificial Sequence
  Probe
ttctgaggccttcactttgggttttctgagccccaacatctgctagtgttgtaaagagaa

SEQ ID NO: 1500 - DNA, 60 bp, Artificial Sequence
  Probe
gttgtctgagtttgtctcactaccaccccatacccgacagacaccatctcaactgtctta

SEQ ID NO: 1501 - DNA, 60 bp, Artificial Sequence
  Probe
tgaccgaactcaacggcgacataatcaccaataccatgacattgggtgacattgtcttca

SEQ ID NO: 1502 - DNA, 60 bp, Artificial Sequence
  Probe
tgcttttgtatgtttcaattaggctctgaaatcttgggcaaaatgacaaggggagggcca

SEQ ID NO: 1503 - DNA, 60 bp, Artificial Sequence
  Probe
attcagcaaggccctctttcattgtacagggatcaaatttcctcctcttttttgtgcccc

SEQ ID NO: 1504 - DNA, 60 bp, Artificial Sequence
  Probe
atcctaaggagattgccacagtgagacttaaggaaatgtttggttggcagatgagcacca

SEQ ID NO: 1505 - DNA, 60 bp, Artificial Sequence
  Probe
ggggcaaaggtaaaaccaaggagaccaattgcagtaatctgggcaagaaatgatgatggt

SEQ ID NO: 1506 - DNA, 60 bp, Artificial Sequence
  Probe
tggcaaccaagtttccaacatgtgaacttttggcggatacattcgtaccacagctaatgg

SEQ ID NO: 1507 - DNA, 60 bp, Artificial Sequence
  Probe
aacaggaaggcaatctctgttttttaaaaaggcctagaggaggtaccagttggctgagct

SEQ ID NO: 1508 - DNA, 60 bp, Artificial Sequence
  Probe
agacgatgtgaaatcgttgtctcgagtgatgatccatgttttcagcgacggcgtaacaaa

SEQ ID NO: 1509 - DNA, 60 bp, Artificial Sequence
  Probe
gggacctgaggactgggaaagtgaagtgttttgcttgagaccacacaggtaataaggaag

SEQ ID NO: 1510 - DNA, 60 bp, Artificial Sequence
  Probe
catgaaggatgtttggtcaccccgccagagcttctcagacaactgacatatatccacaag

SEQ ID NO: 1511 - DNA, 60 bp, Artificial Sequence
  Probe
tgcttcatcaaaacccctttacgtggggcttagacactcctgttgtctctagtgtctagt

SEQ ID NO: 1512 - DNA, 60 bp, Artificial Sequence
  Probe
actgatccagcagtcaaatgatgaacatggtaggtggtgaataaggcagctccttacagc

SEQ ID NO: 1513 - DNA, 60 bp, Artificial Sequence
  Probe
gtcactgcctttcacaatccttccatccttcaatacttgtgggtgtcaccttctccatga

SEQ ID NO: 1514 - DNA, 60 bp, Artificial Sequence
  Probe
ttctcttcccttttggagggagcgttgtctcctactttgtatcttccagacatctgtggt

SEQ ID NO: 1515 - DNA, 60 bp, Artificial Sequence
  Probe
ctgccattaaattcctgtaaaggaacttctcactgagggtgctcattctgtgtgtgggga

SEQ ID NO: 1516 - DNA, 60 bp, Artificial Sequence
  Probe
tcagagacttcctaacagaggtactagactggcctcctgttgacactgagaggttcagtt

SEQ ID NO: 1517 - DNA, 60 bp, Artificial Sequence
  Probe
tatagagttcacacatgctcagtgtggtagctggagcctgttttccataggttcctgact

SEQ ID NO: 1518 - DNA, 60 bp, Artificial Sequence
  Probe
acccgacaactgtccagagagagtgtaagtgtagaaagggtttaaggtgtgtgaggtgtt

SEQ ID NO: 1519 - DNA, 60 bp, Artificial Sequence
  Probe
cttaggttgggctaaacattttggattttagtctaagcccggggggaaccactagagcat

SEQ ID NO: 1520 - DNA, 60 bp, Artificial Sequence
  Probe
aagccagtaacgtgagatgatgttgtcagctaaccacatgctgcaaagatcaatttgccc

SEQ ID NO: 1521 - DNA, 60 bp, Artificial Sequence
  Probe
agggaagctgtaccgaacggatcttgctcttattctctgtgctggggataactagagttg

SEQ ID NO: 1522 - DNA, 60 bp, Artificial Sequence
  Probe
agcccttcatgggagacaattattgtgatgccatcaacaaccgagccttttgcaactatg

SEQ ID NO: 1523 - DNA, 60 bp, Artificial Sequence
  Probe
atgctgttcgcctccttctaccttctggattttatcctggctttagttggcaataccctg

SEQ ID NO: 1524 - DNA, 60 bp, Artificial Sequence
  Probe
ccagttgggatcttggtatgagaactgaccttgagtgtatgcctgagcattcactgcatc

SEQ ID NO: 1525 - DNA, 60 bp, Artificial Sequence
  Probe
gagctatggaagatggcacacattccctttcctacctcttctccctctcccattacagaa

SEQ ID NO: 1526 - DNA, 60 bp, Artificial Sequence
  Probe
aaaaaaaaaaaacaaaggaaggtgagcccctcccttcatggagacttcttggaagcacca

SEQ ID NO: 1527 - DNA, 60 bp, Artificial Sequence
  Probe
tgttaccttagctaactaactctcctccatgttgcctgtctttcccagacttgtccctcc

SEQ ID NO: 1528 - DNA, 60 bp, Artificial Sequence
  Probe
cctgtctgtagtgttgtggggtcctcccatggatcatcaaggtgaaacactttggtattc

SEQ ID NO: 1529 - DNA, 60 bp, Artificial Sequence
  Probe
ctggttggacttggcttcctgaaaactcccactgatagtgcctgttagatctcctgtttg

SEQ ID NO: 1530 - DNA, 60 bp, Artificial Sequence
  Probe
accttagttcctctaggggctgtacagtattgtggcatcagataatgccaccaaaggaga

SEQ ID NO: 1531 - DNA, 60 bp, Artificial Sequence
  Probe
taagtatcaaggaattgaggcctcctgccaacaactgttcaagtgtaccatcttggaggc

SEQ ID NO: 1532 - DNA, 60 bp, Artificial Sequence
  Probe
cctggtttgtgaatgagcctagctgattctggctttttctcctttcttgctctaggggat

SEQ ID NO: 1533 - DNA, 60 bp, Artificial Sequence
  Probe
ctctgcctacatctgacgtccggagtcattaaccaggaatgtatgtgtgtctgtgtgtct

SEQ ID NO: 1534 - DNA, 60 bp, Artificial Sequence
  Probe
tcaaacgggtcattgccattaatagagacctcaaacaccgcctgctaaaaatacccgact

SEQ ID NO: 1535 - DNA, 60 bp, Artificial Sequence
  Probe
gttcccaaagctctggaaaattgtggagggtcaggaagagatcagttggactgaagacag

SEQ ID NO: 1536 - DNA, 60 bp, Artificial Sequence
  Probe
tacgccagtaccgaatgaaaaaactcaacagcagtgatgatgggactcagggttgtatgg

SEQ ID NO: 1537 - DNA, 60 bp, Artificial Sequence
  Probe
atgtccagtgaagcaggtagaactacctagaagtaggttctcagccactaggcccagata

SEQ ID NO: 1538 - DNA, 60 bp, Artificial Sequence
  Probe
ttctagatcaggcccccattgcctgtttcttgaagaactttctacagcagccaagagatg

SEQ ID NO: 1539 - DNA, 60 bp, Artificial Sequence
  Probe
tccataggcttctcctaattctaggtgcagcagtgcatgtgacactgaagaacttcccta

SEQ ID NO: 1540 - DNA, 60 bp, Artificial Sequence
  Probe
acctccatttttctccccgcaacaccataccttccttctccttttgctatgacaatgtct

SEQ ID NO: 1541 - DNA, 60 bp, Artificial Sequence
  Probe
ttccttcttacctctctggctgtctctcctgccttctctctctctctcaactgtctcaaa

SEQ ID NO: 1542 - DNA, 60 bp, Artificial Sequence
  Probe
ggttcagaaggagaaaacaaaacagatggaggaggggcaatgcctcctaagtgattggta

SEQ ID NO: 1543 - DNA, 60 bp, Artificial Sequence
  Probe
tttaccctgtctcctttcttgaggctgatcgatcacagccaggcctctccattctattta

SEQ ID NO: 1544 - DNA, 60 bp, Artificial Sequence
  Probe
cgaggtgtcttgaagcagaaatgtgacttggaactggacagacgttttctcaggaaaggt

SEQ ID NO: 1545 - DNA, 60 bp, Artificial Sequence
  Probe
cctttggaacggcattaagcaatcactaatggatgcccctgggaagtcggtataacctta

SEQ ID NO: 1546 - DNA, 60 bp, Artificial Sequence
  Probe
tgttactgctgatggattcccaacagtttcagtgatgctgcctcttcattcagagcagaa

SEQ ID NO: 1547 - DNA, 60 bp, Artificial Sequence
  Probe
agaccctgtatctggctgtcaacttcctggacaggttcctttcatgtatgtctgttctga

SEQ ID NO: 1548 - DNA, 60 bp, Artificial Sequence
  Probe
tgcaagaagatggtaagatgatccttctctggagaatctgaccagcccaaggagaaggag

SEQ ID NO: 1549 - DNA, 60 bp, Artificial Sequence
  Probe
aggctctggtaatggcgaccattttcctggtaacttagggttatttgtaactccagcagc

SEQ ID NO: 1550 - DNA, 60 bp, Artificial Sequence
  Probe
cagtttcaccagtttctcctcagagtgcagctttgccctggaagggattaaggattagtt

SEQ ID NO: 1551 - DNA, 60 bp, Artificial Sequence
  Probe
acagcagtgtatgaaattgttcccatcagctccagcgcgtgaaagacaatacgaacagta

SEQ ID NO: 1552 - DNA, 60 bp, Artificial Sequence
  Probe
ttctgggttgtgctaaacaacatagggaggaaagctggacctggagtcaaaggaattgag

SEQ ID NO: 1553 - DNA, 60 bp, Artificial Sequence
  Probe
ctctcctcactttttcctccagcatctcttttgggaaggcatgctcctgtaatctgacac

SEQ ID NO: 1554 - DNA, 60 bp, Artificial Sequence
  Probe
aacctccaaaaatgccagtgagagaaggcatagaataaagccaagagtgtcagagggctc

SEQ ID NO: 1555 - DNA, 60 bp, Artificial Sequence
  Probe
tgaatgaaactgccccttggcctcttccctaccatctctaaattgccttcttttccttca

SEQ ID NO: 1556 - DNA, 60 bp, Artificial Sequence
  Probe
tcacaccctgaagacttgaactctgctacccctactgaaatcaagctggagtacgtgaaa

SEQ ID NO: 1557 - DNA, 60 bp, Artificial Sequence
  Probe
ctacgtggaagtgaatggagactgatctcaaatctgaactgcagctttcgctgctgtgag

SEQ ID NO: 1558 - DNA, 60 bp, Artificial Sequence
  Probe
tgtgacctggcatgcctagctactttttctaacttgcctaaaggcactcaatatggacgg

SEQ ID NO: 1559 - DNA, 60 bp, Artificial Sequence
  Probe
agctcttctgtttgtaacactcttgccacagctaaccccttaactcttccactttggctc

SEQ ID NO: 1560 - DNA, 60 bp, Artificial Sequence
  Probe
gagaacacccagtcacacatgagaatgttggcccaggctgttcatagtttgagcgttata

SEQ ID NO: 1561 - DNA, 60 bp, Artificial Sequence
  Probe
gtgtggaccagctttgtcattaacttgctgtgtgaccttagtcaagtcactccccatctc

SEQ ID NO: 1562 - DNA, 60 bp, Artificial Sequence
  Probe
ccctttcatcatcttattcttcagggacagccatcagggtgggaatttcagaccataggc

SEQ ID NO: 1563 - DNA, 60 bp, Artificial Sequence
  Probe
cgtggtctttgagcagtttcttcacaacaacgagaacattgaaaatgaggacctggtggc

SEQ ID NO: 1564 - DNA, 60 bp, Artificial Sequence
  Probe
aacgaatgcttaaaacgtactccagcacctcctccttctctgatgcaaagagccagaaag

SEQ ID NO: 1565 - DNA, 60 bp, Artificial Sequence
  Probe
aagcggattgaaggcagatgatgtcatctatatcactctgcccttttaccacagtgctgc

SEQ ID NO: 1566 - DNA, 60 bp, Artificial Sequence
  Probe
aagttgaggctaggattcctgcactcaaagaggtctgcatatgttagttgcggaaatgca

SEQ ID NO: 1567 - DNA, 60 bp, Artificial Sequence
  Probe
cataatgtccagaagagaagggctgttcaccagcatgtgcacaaagtgatctcaggagag

SEQ ID NO: 1568 - DNA, 60 bp, Artificial Sequence
  Probe
ggagcagcctctccttgaattgttttgtgatttgagtaaaacgggactccccctgttcta

SEQ ID NO: 1569 - DNA, 60 bp, Artificial Sequence
  Probe
gtagtcctggtgaagagaacagcctatctgaaggcactggactagaaaggacagagcatg

SEQ ID NO: 1570 - DNA, 60 bp, Artificial Sequence
  Probe
gaagttttttgctgcgtagacagttttatccccctcaccccaaggtcaattgcacgaatt

SEQ ID NO: 1571 - DNA, 60 bp, Artificial Sequence
  Probe
cctcagcaagcaattagggagaagtacaaggcttcaaagtacctgtgtgtgtccctcatg

SEQ ID NO: 1572 - DNA, 60 bp, Artificial Sequence
  Probe
tcgacctgtactatctgatggacctctcctactccatgcttgatgacctcaggaatgtca

SEQ ID NO: 1573 - DNA, 60 bp, Artificial Sequence
  Probe
cattccccctaaatcctcctgagcttttaggtaagaggccgatgatttcacaatcggcag

SEQ ID NO: 1574 - DNA, 60 bp, Artificial Sequence
  Probe
tcccggcaagcgcttctgctgaaagttcatatctggagcctgatgtcttaacgaataaag

SEQ ID NO: 1575 - DNA, 60 bp, Artificial Sequence
  Probe
tgcctaatcacagtggttgctgtcaaggagtatatacactagctggcgagactagtgtgc

SEQ ID NO: 1576 - DNA, 60 bp, Artificial Sequence
  Probe
tttcactgagcacctactgtgggccaggtcatagtgttgatgtcttcatctgattcccta

SEQ ID NO: 1577 - DNA, 60 bp, Artificial Sequence
  Probe
gtaccctaccttctgtcacttatcaacccctatgagtggggggtgaatagccccatttta

SEQ ID NO: 1578 - DNA, 60 bp, Artificial Sequence
  Probe
tgccaccaacaattatggagaagtctgctaggtgtcagcctctgttctagttaccaggat

SEQ ID NO: 1579 - DNA, 60 bp, Artificial Sequence
  Probe
ttcgaaaacagtgctctcctatttctgccctctagaaagccccaaagtgctaatcactgc

SEQ ID NO: 1580 - DNA, 60 bp, Artificial Sequence
  Probe
tatgttaacatgcatgggaattccctgggcatcttcttgtggtgtggagtctgacttagc

SEQ ID NO: 1581 - DNA, 60 bp, Artificial Sequence
  Probe
tgctacaggggaggttattgtagtaccgtatttgttctgagacacgctactttcccccac

SEQ ID NO: 1582 - DNA, 60 bp, Artificial Sequence
  Probe
agctatacttctggagaagtaggcctggagttactacagtatgggggaaaagggtcgagt

SEQ ID NO: 1583 - DNA, 60 bp, Artificial Sequence
  Probe
tgtgatttgcagttcaagagttcacctggcagctgggagaacaaataagaggaacactga

SEQ ID NO: 1584 - DNA, 60 bp, Artificial Sequence
  Probe
tcactttggtaccttcactgccttctcatgattggcagtgaagaacaaagctccactgaa

SEQ ID NO: 1585 - DNA, 60 bp, Artificial Sequence
  Probe
tcacaacagtcacctcccttcatatatgacaccccaaaacggaagacaaatcatggcgtc

SEQ ID NO: 1586 - DNA, 60 bp, Artificial Sequence
  Probe
atgcagggagagccagcctgcactataaagtccctggggaagaaaaattaaataacagct

SEQ ID NO: 1587 - DNA, 60 bp, Artificial Sequence
  Probe
cagtggatgaatctctgagtgaggaaacacagaaggctgttcttcagtggaccaagcatg

SEQ ID NO: 1588 - DNA, 60 bp, Artificial Sequence
  Probe
gtgacagtgttccaagtgaacaaggcctgtgagtgctagccttggaacatctatagcatc

SEQ ID NO: 1589 - DNA, 60 bp, Artificial Sequence
  Probe
tgacccttggttagggcacttggtttggagcaggtactgtacatggaactttgtgtaaaa

SEQ ID NO: 1590 - DNA, 60 bp, Artificial Sequence
  Probe
tgatctttggtctgccttccttctccttctccaagtcaaaccagtcactctttcctgaga

SEQ ID NO: 1591 - DNA, 60 bp, Artificial Sequence
  Probe
gtttcttgctctctccccatctgtgtgtgtctctgacagtctgtggctctctgtatcttt

SEQ ID NO: 1592 - DNA, 60 bp, Artificial Sequence
  Probe
gcagcctcttgtgacccatgtcaaacatttattctgctttctgcatggtcatggagttcc

SEQ ID NO: 1593 - DNA, 60 bp, Artificial Sequence
  Probe
tttgttcttcttgtcaggcttaccctatgctgctatagatggctgcaacccgtgttcaat

SEQ ID NO: 1594 - DNA, 60 bp, Artificial Sequence
  Probe
gccttcctttatcgctttcagatttggaggccaatcactgccaccttttatttccctgtg

SEQ ID NO: 1595 - DNA, 60 bp, Artificial Sequence
  Probe
tggggtggaaaagaaagtacagaacaaaccctgtgtcactgtcccaagttgctaagtgaa

SEQ ID NO: 1596 - DNA, 60 bp, Artificial Sequence
  Probe
caagtctgtgaaggatctggtcatcttgctttatgaaactgcgctcctgtcttctggctt

SEQ ID NO: 1597 - DNA, 60 bp, Artificial Sequence
  Probe
ttctgaaaggaatgtagaacttgacagcagccttctgagtctgggtcaggaagatgtcct

SEQ ID NO: 1598 - DNA, 60 bp, Artificial Sequence
  Probe
ctttcatggtccccttaccaatcccctattcgtgggcacttagattgcttctggtttctc

SEQ ID NO: 1599 - DNA, 60 bp, Artificial Sequence
  Probe
caacagagatgggagctgagtgctagagtaggtgcagaagtggtaggtcagctacaaatt

SEQ ID NO: 1600 - DNA, 60 bp, Artificial Sequence
  Probe
tgacaaatgaaatagctcagataggcctgtcagctagggctccaacacaggattgcaaag

SEQ ID NO: 1601 - DNA, 60 bp, Artificial Sequence
  Probe
taagatgagacacacccagcaaaggctgtcctcatacagaactacctccaggtgtctttt

SEQ ID NO: 1602 - DNA, 60 bp, Artificial Sequence
  Probe
ggtcggggaaaagtggagagacaaatagaaaagaaatagggaattgggacagggcaccat

SEQ ID NO: 1603 - DNA, 60 bp, Artificial Sequence
  Probe
aagtaccgagttcaacaacaccgtctcttgtagcaatcggccacattgccttactgaaat

SEQ ID NO: 1604 - DNA, 60 bp, Artificial Sequence
  Probe
cttccagcagtgctcttggatctaggagggaggagaaggaaggtacacagcaatttagag

SEQ ID NO: 1605 - DNA, 60 bp, Artificial Sequence
  Probe
caggagtcaggtagagacggatgacctgattctaaaacctggagtggtgcatgtgattga

SEQ ID NO: 1606 - DNA, 60 bp, Artificial Sequence
  Probe
atgactgtctgaaggcagaaatatcccagagtacaggcagagacaaatgagggaggaagg

SEQ ID NO: 1607 - DNA, 60 bp, Artificial Sequence
  Probe
ctcctttgaactttaatgtcccaggattgtagtgctggagcaggattagacccaggcaac

SEQ ID NO: 1608 - DNA, 60 bp, Artificial Sequence
  Probe
gtgatgtaagttcttatttggaaggccaagctgccaaggaattcattgcttggctggtga

SEQ ID NO: 1609 - DNA, 60 bp, Artificial Sequence
  Probe
tttagggagaggaaggtgtttgtgctgatgttgcagttagaggcacgaaaatcaggtagc

SEQ ID NO: 1610 - DNA, 60 bp, Artificial Sequence
  Probe
gaaagtctctttgctctatttgctgacatgcttcctgttgtggtctggccaatgccaaat

SEQ ID NO: 1611 - DNA, 60 bp, Artificial Sequence
  Probe
tgagagccagaccccatctccagagactctgatttaattgttcagggttataagctgggg

SEQ ID NO: 1612 - DNA, 60 bp, Artificial Sequence
  Probe
acagaaaagccagactcaaaaacaaaaatggatctgggtggccacgtgaagcgtaaacat

SEQ ID NO: 1613 - DNA, 60 bp, Artificial Sequence
  Probe
aaaaagggcagagtgacatggctgagctgttggaagctccattgttctgtagtgacttaa

SEQ ID NO: 1614 - DNA, 60 bp, Artificial Sequence
  Probe
tctccgaacctcagtttttctatctgtaaaatggggtgacgggagagaggaatggcagaa

SEQ ID NO: 1615 - DNA, 60 bp, Artificial Sequence
  Probe
tgtaaagtgtttgctctctgggagtaaagtccaaccagctcagggttgatgatttgaggc

SEQ ID NO: 1616 - DNA, 60 bp, Artificial Sequence
  Probe
ctgtggattcatgtttagcatggagactgccatgaacctgcatgttttttcctgctaggc

SEQ ID NO: 1617 - DNA, 60 bp, Artificial Sequence
  Probe
aagatgtatctggccagaggaagaggcattgtttcttttacacaaaggacctgcagggtt

SEQ ID NO: 1618 - DNA, 60 bp, Artificial Sequence
  Probe
ctgctgttttgtagcaagtcagaaagcctgttctttgtcccacagggagatgttacctca

SEQ ID NO: 1619 - DNA, 60 bp, Artificial Sequence
  Probe
tcctgaaagatcaggtctttgcgaagcatattggcaaagaaggggcaacaagaatgcaag

SEQ ID NO: 1620 - DNA, 60 bp, Artificial Sequence
  Probe
agctcttgacagtgattccctttccatggctgttcttcggggaaaagataatttgctcct

SEQ ID NO: 1621 - DNA, 60 bp, Artificial Sequence
  Probe
cgatcagaatactggagacgagaccacgagattgatgagtttgccttgggagtcggtaag

SEQ ID NO: 1622 - DNA, 60 bp, Artificial Sequence
  Probe
caaaaacccctgctctgtcaaagaccagacgccactccaactttctgtagaagataccac

SEQ ID NO: 1623 - DNA, 60 bp, Artificial Sequence
  Probe
actgccctacctccttcaggctgactccacttatcacttcctctcagagatctacttcag

SEQ ID NO: 1624 - DNA, 60 bp, Artificial Sequence
  Probe
gcttggaggtggaggtggagtggagagcataaattatatttctgcaggtgaaaccagagc

SEQ ID NO: 1625 - DNA, 60 bp, Artificial Sequence
  Probe
cttgccagggttacttcatttaatccacacagccctgggagggagactgacattatttcc

SEQ ID NO: 1626 - DNA, 60 bp, Artificial Sequence
  Probe
catgatcaagagcaccactcttaacacccatgtgctccaccctcacaatacaccatcatt

SEQ ID NO: 1627 - DNA, 60 bp, Artificial Sequence
  Probe
gggaaggctgttctgtggatgagtttaattcagccccacaatcacttctgtacagctacc

SEQ ID NO: 1628 - DNA, 60 bp, Artificial Sequence
  Probe
gcagtatttaggcagttcggaagtctgtaccagctttaactttccactgggccctctttc

SEQ ID NO: 1629 - DNA, 60 bp, Artificial Sequence
  Probe
caaatcccttgcacttaggacaaccaaaaccagaaggcacaatgagaagccagcagttac

SEQ ID NO: 1630 - DNA, 60 bp, Artificial Sequence
  Probe
ccataggatgcttttgtaccgtggaccttgttctagcaggatcctttcggaattgcactt

SEQ ID NO: 1631 - DNA, 60 bp, Artificial Sequence
  Probe
cttcacaaagaaaatccagcttcctgcagaggtggatcctgtgacagtatttgcctcact

SEQ ID NO: 1632 - DNA, 60 bp, Artificial Sequence
  Probe
gcaggcttctgaattcccttctgagttaatgtcaaatgacagcaaagcactgtgtggctg

SEQ ID NO: 1633 - DNA, 60 bp, Artificial Sequence
  Probe
ttggcacattttaatgcataagctgggggtttcattttcccaggctctcttcaccatcac

SEQ ID NO: 1634 - DNA, 60 bp, Artificial Sequence
  Probe
gaggttcatctcatggttctgaggacagttgaggaaagatggtggggtctgtttgcattc

SEQ ID NO: 1635 - DNA, 60 bp, Artificial Sequence
  Probe
tatgcatatggctcggctggcagtctccctaaaattccctcgaatgcaactctctttttt

SEQ ID NO: 1636 - DNA, 60 bp, Artificial Sequence
  Probe
acccaatgtattgtaaaaatgaaatgtcaaagggaggctgccgcgggtactcaatgcaag

SEQ ID NO: 1637 - DNA, 60 bp, Artificial Sequence
  Probe
atggagaataggctgtttgtgttagtgaagtgtaggaccttggtgagagcagtctcaggg

SEQ ID NO: 1638 - DNA, 60 bp, Artificial Sequence
  Probe
acttcaagaagttcaaggtggccctcttctctcgcctggtcaatgctctaagtgaagata

SEQ ID NO: 1639 - DNA, 60 bp, Artificial Sequence
  Probe
atcaggctggagctgctgaaatggattgaagtgaaagccaaagctaaaaagctgcagatc

SEQ ID NO: 1640 - DNA, 60 bp, Artificial Sequence
  Probe
gacaagttccagctcacattcccactgcggaccaactatatgtatgccaaggtgaagaag

SEQ ID NO: 1641 - DNA, 60 bp, Artificial Sequence
  Probe
cctcacctgagagcttgttagaaatgcagattcttggaccctatgccaaacctcccaaat

SEQ ID NO: 1642 - DNA, 60 bp, Artificial Sequence
  Probe
ggctattattgccctctaacaggaagacgcagaaaggtgatgtgtcaagttcagcgtcac

SEQ ID NO: 1643 - DNA, 60 bp, Artificial Sequence
  Probe
cgaagagatcaaagagttcgccgcgggctacaacgtcaaattcgatatgttcagcaagat

SEQ ID NO: 1644 - DNA, 60 bp, Artificial Sequence
  Probe
aatgcagaaaaggcacagaaggaacatcagaggaaaatgagggggaacaggaactctgag

SEQ ID NO: 1645 - DNA, 60 bp, Artificial Sequence
  Probe
gcaagggagtctcctttctcagcttcatcgcttctactgattacatggctcagctcctat

SEQ ID NO: 1646 - DNA, 60 bp, Artificial Sequence
  Probe
cctaaccacttctctgtctccgttgcaatttctcctttttctcaagctccagcctagtgc

SEQ ID NO: 1647 - DNA, 60 bp, Artificial Sequence
  Probe
cctcaaagctatgtcttcctgccatggagtggattctctctcactggtgtgtgtactctc

SEQ ID NO: 1648 - DNA, 60 bp, Artificial Sequence
  Probe
caaatagctatgcagagcagagatgccttcacctggcaccaacttgtcttcctttctctc

SEQ ID NO: 1649 - DNA, 60 bp, Artificial Sequence
  Probe
cagacgagttgcacaaaattttactggagaaaaaggatgcctgaacacgcaaagtcggct

SEQ ID NO: 1650 - DNA, 60 bp, Artificial Sequence
  Probe
gcctttgattggtacaagggctgtgtagtgtgactggcaatgtagaagaatgctccatct

SEQ ID NO: 1651 - DNA, 60 bp, Artificial Sequence
  Probe
agacctgttggaggctatgaatgcaatcaaggtgacagacaactggtgcaatgatggtag

SEQ ID NO: 1652 - DNA, 60 bp, Artificial Sequence
  Probe
ttgccctccactttgcttaacactcagttaggttccttcctcagtttctcctacctcctt

SEQ ID NO: 1653 - DNA, 60 bp, Artificial Sequence
  Probe
taaaagaccatcccaactgtgctctaccacactttgctctcctggctaagactcagagac

SEQ ID NO: 1654 - DNA, 60 bp, Artificial Sequence
  Probe
tttccacaaataatgcttcaactagtacttgcgtgccagtgactccacgtcccactcatg

SEQ ID NO: 1655 - DNA, 60 bp, Artificial Sequence
  Probe
agaaatagtcggaactattggtcgaaaaggaaggccagtttttggtctcaaaccccagca

SEQ ID NO: 1656 - DNA, 60 bp, Artificial Sequence
  Probe
gtgtgcccatctctttggtagggaaggagaaaggtaagaatagccatcagtgaggaagga

SEQ ID NO: 1657 - DNA, 60 bp, Artificial Sequence
  Probe
tcactcagtttttcctttactggatctctgggacactgctctttcctggttctcctcctg

SEQ ID NO: 1658 - DNA, 60 bp, Artificial Sequence
  Probe
tcctgcaaatgtgcaaacagacatggctacatagaggcatgcacacatatagacccatgt

SEQ ID NO: 1659 - DNA, 60 bp, Artificial Sequence
  Probe
ggcatttcacctcttgtcacctccaagtgtgtggttgaaatagaggtatccaaccgtgtt

SEQ ID NO: 1660 - DNA, 60 bp, Artificial Sequence
  Probe
cctcactagaaacactagatgtgagggtttggcaagggcgtgatagggacttactagctg

SEQ ID NO: 1661 - DNA, 60 bp, Artificial Sequence
  Probe
gacccaggcttgcaaagtgacggtcattttctctttctttctccctcttgagtccttctg

SEQ ID NO: 1662 - DNA, 60 bp, Artificial Sequence
  Probe
tgttcctcagaagtgtccaggtcatgaacactggaaacaccgaggattggtctaagctta

SEQ ID NO: 1663 - DNA, 60 bp, Artificial Sequence
  Probe
cacagaattgtatcactgatgagagctgtggcgacagagtgctcaccatgtctcttttgc

SEQ ID NO: 1664 - DNA, 60 bp, Artificial Sequence
  Probe
aatgtcttcgcacgtaggttttgcacagtgtttatctgctggtgtctcagggatttgaca

SEQ ID NO: 1665 - DNA, 60 bp, Artificial Sequence
  Probe
gagcaatctgagaagcgaattcgtttttcaccaaccgaaagcaattgaagctgtctcccc

SEQ ID NO: 1666 - DNA, 60 bp, Artificial Sequence
  Probe
atgaggagccaatggaaacagatcagaatgcaaaggaggaagagaagatgcaagtggacc

SEQ ID NO: 1667 - DNA, 60 bp, Artificial Sequence
  Probe
tggagtcactgccaagtcatagccataaatgatgagtcggtcctctttccagtggatcat

SEQ ID NO: 1668 - DNA, 60 bp, Artificial Sequence
  Probe
agggcttcagtgaggagctcaggtctggactacttgaacatgagatgtctgatgactcta

SEQ ID NO: 1669 - DNA, 60 bp, Artificial Sequence
  Probe
tcttatcagtggagaagggaggatgggttgttgaaaatgcagcctggttcaacagtgaag

SEQ ID NO: 1670 - DNA, 60 bp, Artificial Sequence
  Probe
gtgtggtccccaagacctccactaacttcaagttgtagtgcaaaggaaggaaagcattca

SEQ ID NO: 1671 - DNA, 60 bp, Artificial Sequence
  Probe
gtaggttactttcagggatggtctctggccacaagtccctcaagctagttagaaccttcc

SEQ ID NO: 1672 - DNA, 60 bp, Artificial Sequence
  Probe
aatactggctgaccaccttggtgaactattgagcttgcctaggttgactcatgagtgaga

SEQ ID NO: 1673 - DNA, 60 bp, Artificial Sequence
  Probe
aggacctcctaatgagagtatctgggtgattgtgaccccaaaccatctctccaaagcatt

SEQ ID NO: 1674 - DNA, 60 bp, Artificial Sequence
  Probe
gcagtctatgctgttcaggtgcgctgtaagaggctagatggactgggatattggagtaat

SEQ ID NO: 1675 - DNA, 60 bp, Artificial Sequence
  Probe
cactctgacctcttgtcagtttcctgttcctggttccatctttttgaaaaaggccctcct

SEQ ID NO: 1676 - DNA, 60 bp, Artificial Sequence
  Probe
gcacactgcatactgttcctccagggactgaggttgactcttcttagagtgagacattcc

SEQ ID NO: 1677 - DNA, 60 bp, Artificial Sequence
  Probe
ataaagtgttctcaagctggaaagatttaacagattggcccctcggggacctggacattg

SEQ ID NO: 1678 - DNA, 60 bp, Artificial Sequence
  Probe
caaaatccttatgggagtatcacttagcacccagccaggaaggaatctctcatcccctca

SEQ ID NO: 1679 - DNA, 60 bp, Artificial Sequence
  Probe
ttcctccaaacaccccagatcacccttaacatatccactgtctggcaccatcactactac

SEQ ID NO: 1680 - DNA, 60 bp, Artificial Sequence
  Probe
ccgattaagaaactgggggtgagagactaagcaggcaagacagactgaactaagctgtca

SEQ ID NO: 1681 - DNA, 60 bp, Artificial Sequence
  Probe
ctgaagctcctcttcttgatgactttgtcatgtcttacctctttgctcagtggcggcatg

SEQ ID NO: 1682 - DNA, 60 bp, Artificial Sequence
  Probe
tgtgaaggctttgggggaactagacattcttctgcaatggatggaggagacagaatagga

SEQ ID NO: 1683 - DNA, 60 bp, Artificial Sequence
  Probe
aaaggtgctttcttctgggagatctgcttcctttaataacggtgcaagaccagtggttcg

SEQ ID NO: 1684 - DNA, 60 bp, Artificial Sequence
  Probe
gactgagtgtctgctcactgttagagggacaggtgcaaagtgaattagtccatccaggat

SEQ ID NO: 1685 - DNA, 60 bp, Artificial Sequence
  Probe
ttcaggtttttttctatctactgggagactgcctttccttggcgctggttgctaccaatt

SEQ ID NO: 1686 - DNA, 60 bp, Artificial Sequence
  Probe
cctttcccattggctcagctgttcagaaggagagctggacatctcttgttcttttccatt

SEQ ID NO: 1687 - DNA, 60 bp, Artificial Sequence
  Probe
tggcactaacagcgttcaaagaacttgcgtgacaagtgatgactaatgacactgagggtg

SEQ ID NO: 1688 - DNA, 60 bp, Artificial Sequence
  Probe
tagagaaaagtgcctggagggcttttaaggagtcacagtgccatcacatgctcaaacatc

SEQ ID NO: 1689 - DNA, 60 bp, Artificial Sequence
  Probe
accgggtaagtcctacatgctcactgttggttatctccctgggctcatggttttaactta

SEQ ID NO: 1690 - DNA, 60 bp, Artificial Sequence
  Probe
gatcctggaggatgcccaattagggcctagccttaatcaggtcctcagagaatttctacc

SEQ ID NO: 1691 - DNA, 60 bp, Artificial Sequence
  Probe
gatatgattcagccttaaaaaggaaggcgattcggacacacacaccccagggatgaactc

SEQ ID NO: 1692 - DNA, 60 bp, Artificial Sequence
  Probe
gaatgtggtccagccctttagcctcactcagtacttcctttgtcccaactctatccctac

SEQ ID NO: 1693 - DNA, 60 bp, Artificial Sequence
  Probe
tgcactatctggccaccctcagccatgaagacattataggttggatggaaatttttcgca

SEQ ID NO: 1694 - DNA, 60 bp, Artificial Sequence
  Probe
atcaggagaaacagatgctgtttaagtcaggaagaaatgagtgttcgctccaaggcctgc

SEQ ID NO: 1695 - DNA, 60 bp, Artificial Sequence
  Probe
atgtaaagggcgggacactcactcaatatgaaggcaaactgagactggtggaaattgctc

SEQ ID NO: 1696 - DNA, 60 bp, Artificial Sequence
  Probe
cccttctacagatactgccagagatgctgggtgcagaaagaggggatattctcaggaaag

SEQ ID NO: 1697 - DNA, 60 bp, Artificial Sequence
  Probe
ttctaaagtcgagctggaagtgcgtgacctccctgaagagttgtctctatccttcaatgc

SEQ ID NO: 1698 - DNA, 60 bp, Artificial Sequence
  Probe
tagaggtggccatgagtgcaaaaaccaccagcttcaggaggaggaaaaagtagaaaatcc

SEQ ID NO: 1699 - DNA, 60 bp, Artificial Sequence
  Probe
aaaacttctgcacacagaagcattccaaaaagtctgtctccagcctgtaggagccagaat

SEQ ID NO: 1700 - DNA, 60 bp, Artificial Sequence
  Probe
agggtgagactgcgacaaagacttgaaaaaggtggagaagcaagccttgtgggtatttag

SEQ ID NO: 1701 - DNA, 60 bp, Artificial Sequence
  Probe
catcgagggtatgagaacatccagaatttccctcccacctgttatacctcctggaagctg

SEQ ID NO: 1702 - DNA, 60 bp, Artificial Sequence
  Probe
tccgcccataaactcagccccaacaactttagtttcaaagtaagatgggaacatggggaa

SEQ ID NO: 1703 - DNA, 60 bp, Artificial Sequence
  Probe
gtgagcactgatgtggaaattattggaaaaagccatgccaagctcacagtgggaagtgtc

SEQ ID NO: 1704 - DNA, 60 bp, Artificial Sequence
  Probe
gtttctcatcgagatgctgctgcccaagaagtaccatgtgctgaggtttctggataaagg

SEQ ID NO: 1705 - DNA, 60 bp, Artificial Sequence
  Probe
caggaagttggccaatcagaagcggttcagtgagtttatgaggcaatacttggtcctgag

SEQ ID NO: 1706 - DNA, 60 bp, Artificial Sequence
  Probe
cgaaggtgccttggaatatggaatcacaagtgatgacatcttctggctgaaggaatcccc

SEQ ID NO: 1707 - DNA, 60 bp, Artificial Sequence
  Probe
acccttgaagaaaaggggtttcaatttttggatgattaggctcagtagtccagtgggcca

SEQ ID NO: 1708 - DNA, 60 bp, Artificial Sequence
  Probe
agtggctatggattgcaacacattggtctaatgaggcctggagattggttcagaagcttt

SEQ ID NO: 1709 - DNA, 60 bp, Artificial Sequence
  Probe
gaagtcagggaaggcctctccaaggagatgacatcttagcggatgcttcagggtataaag

SEQ ID NO: 1710 - DNA, 60 bp, Artificial Sequence
  Probe
atctgtctctcccgcctgtaaaatggaataatgatagccagctgccatagcttgactcga

SEQ ID NO: 1711 - DNA, 60 bp, Artificial Sequence
  Probe
tttggttgggtattctgacccagctcagagtttgtgcaaagcactatttcccagtaccag

SEQ ID NO: 1712 - DNA, 60 bp, Artificial Sequence
  Probe
cttgagggagagatcactacattaaaccataagcttcaggacgcgtctgcagaggtggag

SEQ ID NO: 1713 - DNA, 60 bp, Artificial Sequence
  Probe
gcagtaccaaaaaggacacactctggccattctccatgagatgcttcagcagatcttcag

SEQ ID NO: 1714 - DNA, 60 bp, Artificial Sequence
  Probe
cagcttcacctgacaacgactgttcctatgaagaagccacttgtgttttaagcagaggca

SEQ ID NO: 1715 - DNA, 60 bp, Artificial Sequence
  Probe
gattcagagtgggcacatgttgggagacagtaatgggtttgggtgtgtgtaaatgagtgt

SEQ ID NO: 1716 - DNA, 60 bp, Artificial Sequence
  Probe
cgtactgcatttgccccttgagccaggtggatgtttaccgtgtgttatataacttcctgg

SEQ ID NO: 1717 - DNA, 60 bp, Artificial Sequence
  Probe
ctgcttccattgtcacatctcccctctctcctctgacctttctgcctctaactctaccta

SEQ ID NO: 1718 - DNA, 60 bp, Artificial Sequence
  Probe
tggacagttgttcagagaccacgatcatgtgtctggtgtctcactgtggaatagtggttt

SEQ ID NO: 1719 - DNA, 60 bp, Artificial Sequence
  Probe
ctgaagatggccctcgctgtgacatttaacagcaacctcaaaagtgagagacccaaatct

SEQ ID NO: 1720 - DNA, 60 bp, Artificial Sequence
  Probe
ttgtaggtaagagctctgaggatgtgtcttggaacttggagggctaggatttggggattg

SEQ ID NO: 1721 - DNA, 60 bp, Artificial Sequence
  Probe
atcctcgtggccttggcagtcttttttcttgtctccactcagctgtttgcagaagaaata

SEQ ID NO: 1722 - DNA, 60 bp, Artificial Sequence
  Probe
aggcccctcccttagagaatgtgtgtatgtgtgtgttttcaggttccttggcatgatttc

SEQ ID NO: 1723 - DNA, 60 bp, Artificial Sequence
  Probe
ggtaaaggagtggcaagggagtcagagacaagagatctctttggagaggcattccagaag

SEQ ID NO: 1724 - DNA, 60 bp, Artificial Sequence
  Probe
gcttggaaaatggaggcagcacagatggtctcctgcagaaagtctggtgataaaatgaga

SEQ ID NO: 1725 - DNA, 60 bp, Artificial Sequence
  Probe
ggataccagcccctcatacattgataaattggtacaagggatcagcttttcccagcccac

SEQ ID NO: 1726 - DNA, 60 bp, Artificial Sequence
  Probe
taccatttccttccttgtaagtctgaaagttctgggctccagtctcccaagtccagtgtt

SEQ ID NO: 1727 - DNA, 60 bp, Artificial Sequence
  Probe
tgcttgtcaggtggttggcagaattcatttctctatggttgtggaactgaagtccagctt

SEQ ID NO: 1728 - DNA, 60 bp, Artificial Sequence
  Probe
cctgcctagcaccgtgacaggaatcagtgctatgatttttaggtgggaaagcacagaatc

SEQ ID NO: 1729 - DNA, 60 bp, Artificial Sequence
  Probe
gcgaacgctacgccatggtttatggatacaatgctgcctataatcgctacttcaggaagc

SEQ ID NO: 1730 - DNA, 60 bp, Artificial Sequence
  Probe
tgctaagccagaccggtcctcgtttgtaccgtccctcttcagtaagaagaagaaaaatgt

SEQ ID NO: 1731 - DNA, 60 bp, Artificial Sequence
  Probe
atggagcatcataggcccagagagacatggctatggacttagtaccttggcatcactttt

SEQ ID NO: 1732 - DNA, 60 bp, Artificial Sequence
  Probe
cctggctgatccaggggatcttgctagtaacctctaactgaagcctcattctagcacatg

SEQ ID NO: 1733 - DNA, 60 bp, Artificial Sequence
  Probe
ttggattccaaccctatgaaggattacatgatcctgagtggtccccagaagacagctgtt

SEQ ID NO: 1734 - DNA, 60 bp, Artificial Sequence
  Probe
gatttggggaagtgggccatttgtaagggttggtcagagaagacctttgatgaactgaca

SEQ ID NO: 1735 - DNA, 60 bp, Artificial Sequence
  Probe
tgatgcacctgttcctcatggtctccagacttttctgtgaagtacagcatgtagtgtgga

SEQ ID NO: 1736 - DNA, 60 bp, Artificial Sequence
  Probe
ttttctccttcctgggtacagtgctattctgcctagaggtgagtttttgcctgtctcaca

SEQ ID NO: 1737 - DNA, 60 bp, Artificial Sequence
  Probe
tggctggcaatggtctatgtttacaccttagcagagagaattcacactcctctgtcctcc

SEQ ID NO: 1738 - DNA, 60 bp, Artificial Sequence
  Probe
agttcacatctccgttttttcctccccctaattcgaaagaggctttcaattgtctccgcc

SEQ ID NO: 1739 - DNA, 60 bp, Artificial Sequence
  Probe
gtgtaggaacttgggctgcatcaatgctcaaggaaaggaagacatctccatgaattccgt

SEQ ID NO: 1740 - DNA, 60 bp, Artificial Sequence
  Probe
ttctgggaagagagccatggctccagccatactccacagaatcttatcacagtgaagatg

SEQ ID NO: 1741 - DNA, 60 bp, Artificial Sequence
  Probe
cctcttgccttactgaaagcccccttctttccctaagccacaatttcccagtctgtaaag

SEQ ID NO: 1742 - DNA, 60 bp, Artificial Sequence
  Probe
tcaaggacttgaaagcatccatgtgtggactcaagtccttacctcttccggagatgtagc

SEQ ID NO: 1743 - DNA, 60 bp, Artificial Sequence
  Probe
cattcttgaccccatatccaaccccaactcaacttcacctccaatcctatgcccaacttc

SEQ ID NO: 1744 - DNA, 60 bp, Artificial Sequence
  Probe
ttcagtacctggacagcattggaggataatggtcaagaccatgggctgtgaagttagtca

SEQ ID NO: 1745 - DNA, 60 bp, Artificial Sequence
  Probe
gatgggttcaaatcctgactctgcttccacttggcttcacgtcttgagcaatctgcatat

SEQ ID NO: 1746 - DNA, 60 bp, Artificial Sequence
  Probe
tttctttcaaaccacaggtcagagacagaacctccttccagctactcaatcctggaacgt

SEQ ID NO: 1747 - DNA, 60 bp, Artificial Sequence
  Probe
ggatcatggaaaagtcatgggttaactggaagacttgctctggcagatgggacaaggttt

SEQ ID NO: 1748 - DNA, 60 bp, Artificial Sequence
  Probe
aaatgcttcctgtgaatggaagatgtgtttctgtgcctcactgtcttcactgtgctggat

SEQ ID NO: 1749 - DNA, 60 bp, Artificial Sequence
  Probe
tttagcagcatccctggccattacccactggatatgagtagcatccctacccaagttatt

SEQ ID NO: 1750 - DNA, 60 bp, Artificial Sequence
  Probe
gggaataacccagtctgtgtccacctggtcatctgatttcctactgctgcaggattctaa

SEQ ID NO: 1751 - DNA, 60 bp, Artificial Sequence
  Probe
ctcagctttactcaaagcctccatgacttagcaggttcaggttaggcgaccttcttaggt

SEQ ID NO: 1752 - DNA, 60 bp, Artificial Sequence
  Probe
agcgaggcaaaagagtagagatgttttagtgaactaggccatgacttggggagtctccac

SEQ ID NO: 1753 - DNA, 60 bp, Artificial Sequence
  Probe
tggtcttccaagttctcagtttcctgatttgagtagcaaggagatgggtctggattcgct

SEQ ID NO: 1754 - DNA, 60 bp, Artificial Sequence
  Probe
aactctgaagagcaaaaagggacaaacactaactgctgagctgggccatttgatctcctt

SEQ ID NO: 1755 - DNA, 60 bp, Artificial Sequence
  Probe
agggccagattcatcatttcaaagttactttctatatgcggccggaacagggtggttgac

SEQ ID NO: 1756 - DNA, 60 bp, Artificial Sequence
  Probe
tcgtgaatgacgaccagtccttttacgctgatgtgcacgtggaagatggcttgataaaac

SEQ ID NO: 1757 - DNA, 60 bp, Artificial Sequence
  Probe
ctggaaatcacgtgtgtgtaggtgtgtggcatgtgtataggggtgtgtttatgtggtgtg

SEQ ID NO: 1758 - DNA, 60 bp, Artificial Sequence
  Probe
ctaacgtgcctaagattggaggtgacgatatctctgtgatgctgggggagaaatcacagg

SEQ ID NO: 1759 - DNA, 60 bp, Artificial Sequence
  Probe
ctcaatggaaaacgagcggaaatagtgtgggagggtaggagaggcgattgatttgcattt

SEQ ID NO: 1760 - DNA, 60 bp, Artificial Sequence
  Probe
ctgtcccaggataggcaagtgctcctatactgactctggcaacaccttaccaaaagtctt

SEQ ID NO: 1761 - DNA, 60 bp, Artificial Sequence
  Probe
ccaccactacaacaatcaacacagacttctgtgaccaaatatgtgggggatttgccctca

SEQ ID NO: 1762 - DNA, 60 bp, Artificial Sequence
  Probe
agaacttcgtccagctctactttctggggtcaagatgagaccaagctgttggatctttgt

SEQ ID NO: 1763 - DNA, 60 bp, Artificial Sequence
  Probe
agacaaaggtgagacttcctttcattcaagggacattcacagagcaaagtgcgtggtcac

SEQ ID NO: 1764 - DNA, 60 bp, Artificial Sequence
  Probe
atttgggcttacagctctgtgcagaaacaggggatggacgcagtatcaacgtaaaatctg

SEQ ID NO: 1765 - DNA, 60 bp, Artificial Sequence
  Probe
tttttgccgggaaagtcgctacatggatcaatgggttccagtgattaatctccctgaacg

SEQ ID NO: 1766 - DNA, 60 bp, Artificial Sequence
  Probe
ccactcctccccctgcaatattactgtctttaggtctttcctcttgggctgacatagagc

SEQ ID NO: 1767 - DNA, 60 bp, Artificial Sequence
  Probe
gtagaggagaaggggtgttgcttgggcaaaatccaagaagtaggaatgatcatgctgcat

SEQ ID NO: 1768 - DNA, 60 bp, Artificial Sequence
  Probe
gaagcttagcataaggcaggtggtactatggatttcctcctcttgagggactgtggtgtc

SEQ ID NO: 1769 - DNA, 60 bp, Artificial Sequence
  Probe
gagtcaatcactactctcagcaagcagccttaactgggaatcctcaaaggggcatttgtg

SEQ ID NO: 1770 - DNA, 60 bp, Artificial Sequence
  Probe
ataaatggcttacgtaactgctgccatccacactgtcaaaccatgatgggcaacctaagt

SEQ ID NO: 1771 - DNA, 60 bp, Artificial Sequence
  Probe
ttccagccctgagaaagttctaaggtgtacaaaacaaaggcaagcccctgagtgtgaatc

SEQ ID NO: 1772 - DNA, 60 bp, Artificial Sequence
  Probe
agctttctatcctggccacactgaggtgcatagcgtaatgtccatgttgttctacactct

SEQ ID NO: 1773 - DNA, 60 bp, Artificial Sequence
  Probe
cagccttctctgtgtgtatttctggctggaacggtgagatttggagaagcccagaaaaat

SEQ ID NO: 1774 - DNA, 60 bp, Artificial Sequence
  Probe
cctggacctgtgatgattagggctgaataacggtgtctacttgggtgtaaaagccaggta

SEQ ID NO: 1775 - DNA, 60 bp, Artificial Sequence
  Probe
gtgcctattgtggaacctgaaatattgcctgatggagaccacgacctcaaacgttgtcag

SEQ ID NO: 1776 - DNA, 60 bp, Artificial Sequence
  Probe
cggggcattgactcaaagcactggaactcatattgtaccacgactcacacctttgtcaag

SEQ ID NO: 1777 - DNA, 60 bp, Artificial Sequence
  Probe
ggtataggagctccaaggacaagaaacacgtctggctaggagaaactatcaatgctggca

SEQ ID NO: 1778 - DNA, 60 bp, Artificial Sequence
  Probe
agtaggcagcaaagccaaagaaaatagcctaaggcacagccactaaaaggaacgtgatca

SEQ ID NO: 1779 - DNA, 60 bp, Artificial Sequence
  Probe
tagtgtgttgaaggaaaatggggacagtgttgtccaaacgtgctgggctactttgatgaa

SEQ ID NO: 1780 - DNA, 60 bp, Artificial Sequence
  Probe
ggatggtgacactagggatggactgacttgagacaggtcttagaggtagaatggacagct

SEQ ID NO: 1781 - DNA, 60 bp, Artificial Sequence
  Probe
taaagggactgcagtgtgaaggtgacctactgaataaaggtggctcccttacctgtgttt

SEQ ID NO: 1782 - DNA, 60 bp, Artificial Sequence
  Probe
cctgaaggagattaagagttggaaggctgtcagcaacccacattttcacagcttggaact

SEQ ID NO: 1783 - DNA, 60 bp, Artificial Sequence
  Probe
tcccaggataggtgaaagggttaaaatgagtaaagcagttgagcaaacaccaacccgagc

SEQ ID NO: 1784 - DNA, 60 bp, Artificial Sequence
  Probe
aagtttgctttgattggtgggaccagtcttgcccttgaccttatcttagaggttgaaggc

SEQ ID NO: 1785 - DNA, 60 bp, Artificial Sequence
  Probe
ctgggagtcatgtttctcttctctctcagttctacttggagcaagagctttcctgggctg

SEQ ID NO: 1786 - DNA, 60 bp, Artificial Sequence
  Probe
gagcgaaaaagaagaacaacagcaaatccggtctacagtggagcagtctttgagccagag

SEQ ID NO: 1787 - DNA, 60 bp, Artificial Sequence
  Probe
gatctatactgaatcccccagtcctcggggtcttctggaccttgtccatatccttaggac

SEQ ID NO: 1788 - DNA, 60 bp, Artificial Sequence
  Probe
aatgttaacccggttgctcgctggtgaaataactaccgtgaccctctattgatacctggt

SEQ ID NO: 1789 - DNA, 60 bp, Artificial Sequence
  Probe
ggttcaggctgttcttgcctctccttggtgtgtcagagtagaggagaaatgactttcagt

SEQ ID NO: 1790 - DNA, 60 bp, Artificial Sequence
  Probe
acctaacagagaaagcagatgtggtcagttcctgcaacttttcttccgcctctctcttct

SEQ ID NO: 1791 - DNA, 60 bp, Artificial Sequence
  Probe
tatggctggtacatcgtcttcagctgcatccttctctacgtggtctttcagaagctttcc

SEQ ID NO: 1792 - DNA, 60 bp, Artificial Sequence
  Probe
gaggtatggtcatttgtgcacagccacacagctcctacatgacagctcagacattcaatg

SEQ ID NO: 1793 - DNA, 60 bp, Artificial Sequence
  Probe
tgggacagtggcttggaagaggtaatggaggctaggaaggtgtttatcaacaaaggaaga

SEQ ID NO: 1794 - DNA, 60 bp, Artificial Sequence
  Probe
gaggcttcacacagggtttggctaacttgcctttgttcgactgtcttctgtcatgtaagg

SEQ ID NO: 1795 - DNA, 60 bp, Artificial Sequence
  Probe
agtgaatggcatcaaggtacaaaatggtggcattgttactgacaccccagcttctaacca

SEQ ID NO: 1796 - DNA, 60 bp, Artificial Sequence
  Probe
ccacacgcacaaggacaccgtctacaacgtcatcatgagccagtacctagaacttaaact

SEQ ID NO: 1797 - DNA, 60 bp, Artificial Sequence
  Probe
acttctttgccttcactaacagctccctgaatccagtaatttatgtctttgtgggccggc

SEQ ID NO: 1798 - DNA, 60 bp, Artificial Sequence
  Probe
caagtgagaggcagagctgggatttgaatccagatctgcctgatactgaagtctaggctg

SEQ ID NO: 1799 - DNA, 60 bp, Artificial Sequence
  Probe
ggtactgatggacttaaccggagttcggaaaccgtcctgtgtacacatgggagtttagtg

SEQ ID NO: 1800 - DNA, 60 bp, Artificial Sequence
  Probe
gcaagactggaaatctgtctcctcacaagactgagctgctagtggaggttaccatgtctg

SEQ ID NO: 1801 - DNA, 60 bp, Artificial Sequence
  Probe
cttcaacaacagcttttagtcagcacttcccagccatggagactccaggatctcctctta

SEQ ID NO: 1802 - DNA, 60 bp, Artificial Sequence
  Probe
ccttatccaaccctgaagttccctatctggctggagaccctctttcacaaagatcccttt

SEQ ID NO: 1803 - DNA, 60 bp, Artificial Sequence
  Probe
aacccctatgacccctcgccttccgtaactaaaataggcatggtcatagtgtctgtttcc

SEQ ID NO: 1804 - DNA, 60 bp, Artificial Sequence
  Probe
aagctcaaggtttctgacctgtatcccaagtcccagaagcagaatggactaactcagagc

SEQ ID NO: 1805 - DNA, 60 bp, Artificial Sequence
  Probe
aaaaaccaagggacatcagatttcttacccagccgaccaagatattcctgggaatggcac

SEQ ID NO: 1806 - DNA, 60 bp, Artificial Sequence
  Probe
catgaactgagggacctctatgacattgggcagggcttcaaagggatcagatacagtctt

SEQ ID NO: 1807 - DNA, 60 bp, Artificial Sequence
  Probe
gtagtaggcactcaagaaatgtgtgttgaatgaacgatgcctgtgacaagcaagcggact

SEQ ID NO: 1808 - DNA, 60 bp, Artificial Sequence
  Probe
aagaaggccacttcccacgggtaacaactgtttcagaactcacaaagagaaacaacctgg

SEQ ID NO: 1809 - DNA, 60 bp, Artificial Sequence
  Probe
gcagggtttgcctgactgtaaaacgccttttttgttttgagacgaagtagcgctctgttg

SEQ ID NO: 1810 - DNA, 60 bp, Artificial Sequence
  Probe
gggtccttgagatctccttggcatccactcccatttcctatctgggacttcattatcacc

SEQ ID NO: 1811 - DNA, 60 bp, Artificial Sequence
  Probe
tcagagcatccatttgtgaatggagttgagaagctggtgccagactctctgtatgttcct

SEQ ID NO: 1812 - DNA, 60 bp, Artificial Sequence
  Probe
ttcttcctcgtttctggttttctcaccattcagtcgctcgcatttctggttcccttttcc

SEQ ID NO: 1813 - DNA, 60 bp, Artificial Sequence
  Probe
aatgaggacggttagtcaccctacaagtggcagatgctgtgattggtccttgtcatactc

SEQ ID NO: 1814 - DNA, 60 bp, Artificial Sequence
  Probe
gtcactttggcatcctctgatgaactcacacatgcctcagtgcctcagtgaaaagaacag

SEQ ID NO: 1815 - DNA, 60 bp, Artificial Sequence
  Probe
catttaggagggtttgcaggtccagagtaaagtcactgaagagtggaagcgaggaaggaa

SEQ ID NO: 1816 - DNA, 60 bp, Artificial Sequence
  Probe
ctgttcctgagggctttgtcattcccagaggaaatgttctcttcacggtggaaaacacag

SEQ ID NO: 1817 - DNA, 60 bp, Artificial Sequence
  Probe
caacgggcaaagaatggaggtggagaagtagatgtggtcaagtgttctctaggtcaacct

SEQ ID NO: 1818 - DNA, 60 bp, Artificial Sequence
  Probe
ccagtcatatgctgtctttttgccccagaggagaaatgtctgaagtaagacccctctcca

SEQ ID NO: 1819 - DNA, 60 bp, Artificial Sequence
  Probe
tctgagttttgacatcttgcagcctcctccattctaacaaaatgccagggaaaggctctg

SEQ ID NO: 1820 - DNA, 60 bp, Artificial Sequence
  Probe
aggaaacagatcatagaagcctgtggtttcatcctgtgttctcagagaagaggcaccagg

SEQ ID NO: 1821 - DNA, 60 bp, Artificial Sequence
  Probe
ttctctgagccaccaatttctgtatctgccaagagggaacagtaatagctcaactgccct

SEQ ID NO: 1822 - DNA, 60 bp, Artificial Sequence
  Probe
ctccagaatcgatccctactacctcctagtccaagtcaccattggactcaactggaccat

SEQ ID NO: 1823 - DNA, 60 bp, Artificial Sequence
  Probe
tcagatatggtgaggggaagaacatggtgagggaaagaccatgaacccatggatagcatc

SEQ ID NO: 1824 - DNA, 60 bp, Artificial Sequence
  Probe
cggaagtcacacacagcatcctcccccaccacagtggagttaaactgaattgaaaatcag

SEQ ID NO: 1825 - DNA, 60 bp, Artificial Sequence
  Probe
tccccagcaccatttttgaagagactctcctttgccaatgtgtgttcttggtacctttgt

SEQ ID NO: 1826 - DNA, 60 bp, Artificial Sequence
  Probe
tggcaccactcacacatgatcacattatcatgtgactagcacctactagagccgcacatc

SEQ ID NO: 1827 - DNA, 60 bp, Artificial Sequence
  Probe
atgttagtcaagacctaagcagaggtggaagcacgagcttttctgtcctacatgctcctg

SEQ ID NO: 1828 - DNA, 60 bp, Artificial Sequence
  Probe
ataaacacgatttccctccatcactaacttcatctgcagggcctaagcctccttcacagt

SEQ ID NO: 1829 - DNA, 60 bp, Artificial Sequence
  Probe
tactacacagggaactgggattcctggctggcagtaggagttcttgagttttattgccaa

SEQ ID NO: 1830 - DNA, 60 bp, Artificial Sequence
  Probe
ttggatcaatgggacacctttggtgaaaaagggtctgcgacagggttactttgtagaagc

SEQ ID NO: 1831 - DNA, 60 bp, Artificial Sequence
  Probe
aacccgctaaactttctcatgcaactaaaatttctgggggaaatgagggtgggggttgta

SEQ ID NO: 1832 - DNA, 60 bp, Artificial Sequence
  Probe
gattgagggaaagcatgtctgctgggtgtgaccatgtttcctctcaataaagttcccctg

SEQ ID NO: 1833 - DNA, 60 bp, Artificial Sequence
  Probe
caggctctgagccaaacactgcctgttttctttgtctgatttctcacaactcccccatta

SEQ ID NO: 1834 - DNA, 60 bp, Artificial Sequence
  Probe
acacgagtatctgctttaggaagatttctgcaacacggcagggtgcaattcaaactctgg

SEQ ID NO: 1835 - DNA, 60 bp, Artificial Sequence
  Probe
gatgtttgagctaggctctgaggaatgaataggagtttgctggttggatgcatgcagagc

SEQ ID NO: 1836 - DNA, 60 bp, Artificial Sequence
  Probe
ggtccatttgaatccaaagtccctgtactttccactgccctacctagatgtccctgtacc

SEQ ID NO: 1837 - DNA, 60 bp, Artificial Sequence
  Probe
ggacccctgttagcagagaggacagtctccggaatattctttggagttgaattgctggaa

SEQ ID NO: 1838 - DNA, 60 bp, Artificial Sequence
  Probe
gccaacaggcttggattccatttctcatgactccgccaactgtgaattgcctttgttaac

SEQ ID NO: 1839 - DNA, 60 bp, Artificial Sequence
  Probe
cgaaagattcttccaggcagagttgcagatttgtcttagatgctgccaccccaatgtctt

SEQ ID NO: 1840 - DNA, 60 bp, Artificial Sequence
  Probe
ttctctacgcctttcttgatgaaaacttcaagcggtgtttccgggacttctgctttccac

SEQ ID NO: 1841 - DNA, 60 bp, Artificial Sequence
  Probe
aggatattttgaatccagactggcacccacgtcacaggaaagcctaggaacactgtaagt

SEQ ID NO: 1842 - DNA, 60 bp, Artificial Sequence
  Probe
gtggctgtgaagctcaaagtagactgggatgtggccgtgcttggtaaactgtaaaatgat

SEQ ID NO: 1843 - DNA, 60 bp, Artificial Sequence
  Probe
tcccagagtcatctgattggacaggcatgggtgcaaggaaaattagggtactcaacctaa

SEQ ID NO: 1844 - DNA, 60 bp, Artificial Sequence
  Probe
tagggagtgtgatcttagagagcagaagtgaaaaggaaagggaggcgaggtaggaggaag

SEQ ID NO: 1845 - DNA, 60 bp, Artificial Sequence
  Probe
acacctgagtctgtttgctcttctgtaaaatggggacactggtatctctgcatcgtggag

SEQ ID NO: 1846 - DNA, 60 bp, Artificial Sequence
  Probe
gttgtccacccattttacagatggagaaagcaaggtgatgtctcttgctaaggccaccag

SEQ ID NO: 1847 - DNA, 60 bp, Artificial Sequence
  Probe
ggagactttgagttttctgtgggtgtaagttttgcaaatggtcctggtagccctgaagct

SEQ ID NO: 1848 - DNA, 60 bp, Artificial Sequence
  Probe
gtactggtgtttaggttgtactctgggggagatagctgctagaagttggcccaattgtgt

SEQ ID NO: 1849 - DNA, 60 bp, Artificial Sequence
  Probe
agactgtcagtcatcctcctggagaaggcatcctaattggccagctctatttttggtagc

SEQ ID NO: 1850 - DNA, 60 bp, Artificial Sequence
  Probe
gggtccgctgcaattagaacggctacatctagaaggcaacaaattgcaagtactgggaaa

SEQ ID NO: 1851 - DNA, 60 bp, Artificial Sequence
  Probe
ttacacaatcctcctggactcttgaatacgccctgttttacaggcgagggaaactgagtc

SEQ ID NO: 1852 - DNA, 60 bp, Artificial Sequence
  Probe
aactttagctgcccatcagaatcacctggaaggtttgttaaacctcagattgctgggctc

SEQ ID NO: 1853 - DNA, 60 bp, Artificial Sequence
  Probe
tgagccctcaaagacccagacttttaccttctcagaaacgcaattcattgcagtgactgc

SEQ ID NO: 1854 - DNA, 60 bp, Artificial Sequence
  Probe
tggaggctgtggctttttcctttttcatcctcaggttgttttggggagaccttaagtctg

SEQ ID NO: 1855 - DNA, 60 bp, Artificial Sequence
  Probe
tagtacatgagataggctgtgggtggcaaggtttcttgagaaagtgagggatgcacagtt

SEQ ID NO: 1856 - DNA, 60 bp, Artificial Sequence
  Probe
attgtcgcacgtaacacacagataatccccttcccccatgtacctacacaaagccatact

SEQ ID NO: 1857 - DNA, 60 bp, Artificial Sequence
  Probe
gcaatgagtcttgcctcactcacagtagaggcactagcagaagaggccttcagaatacac

SEQ ID NO: 1858 - DNA, 60 bp, Artificial Sequence
  Probe
agaacgatttcgagctgaggaaaaaggttggggaatcagaaccaaagagcccctaaaagc

SEQ ID NO: 1859 - DNA, 60 bp, Artificial Sequence
  Probe
ggattcattgcttcgaaggagtgacggcgatcatcttctgtgtagcactgagtgactacg

SEQ ID NO: 1860 - DNA, 60 bp, Artificial Sequence
  Probe
ccctttcttgtgtctcaaggacagaagagacttcaggttcccccaggagatggtaaaagg

SEQ ID NO: 1861 - DNA, 60 bp, Artificial Sequence
  Probe
caacggctggttattaagcacttatggcatacccagcccattccatccactcacatgatt

SEQ ID NO: 1862 - DNA, 60 bp, Artificial Sequence
  Probe
agattgatgtgattacttttcgaacacttgtcatgccagttgtcttgtggaccccggcag

SEQ ID NO: 1863 - DNA, 60 bp, Artificial Sequence
  Probe
atctctgctgcttaatagctggacgaccttagacagccttcctaacctctctgagctcaa

SEQ ID NO: 1864 - DNA, 60 bp, Artificial Sequence
  Probe
taagccactgagagctggggtctgtctttgttaatgcatgccaaagtgctttggtaaagt

SEQ ID NO: 1865 - DNA, 60 bp, Artificial Sequence
  Probe
aattttcatgacaagatcagaaaaggctgcgtcatcaccatctcgggacgcatgaccttc

SEQ ID NO: 1866 - DNA, 60 bp, Artificial Sequence
  Probe
accaacaaagagctctgctgcctcgtctatacctcctggcagattccacaaaagttcata

SEQ ID NO: 1867 - DNA, 60 bp, Artificial Sequence
  Probe
ctacatggattccctactttgaagagtgtgggggaaagcctacgcttctccctgaagttt

SEQ ID NO: 1868 - DNA, 60 bp, Artificial Sequence
  Probe
aagagaaccaggaaaggcttcagacttctgaacccacatcctaagccaaaccccaaaaac

SEQ ID NO: 1869 - DNA, 60 bp, Artificial Sequence
  Probe
cttctaaacttggattccggatctgggatgtggcggattatgtgataccagctcaggagg

SEQ ID NO: 1870 - DNA, 60 bp, Artificial Sequence
  Probe
agtgctttctaataactcgcatggttgttggactgaggtctctgttcctcaccacctgtt

SEQ ID NO: 1871 - DNA, 60 bp, Artificial Sequence
  Probe
ataaactttctagcgcattttgagagagggctttcttgggtgagggagcatggcaaagtc

SEQ ID NO: 1872 - DNA, 60 bp, Artificial Sequence
  Probe
aagattattcagaaggtcggggatggagctaagctgccacctggttaattaaggtcccaa

SEQ ID NO: 1873 - DNA, 60 bp, Artificial Sequence
  Probe
acctctccaggctgaaacctcatcatttttttactgcagccatgctggacaagttatgct

SEQ ID NO: 1874 - DNA, 60 bp, Artificial Sequence
  Probe
tccagggatccctggttccttttatggcgaatgacattagagaacaagatctgggctctg

SEQ ID NO: 1875 - DNA, 60 bp, Artificial Sequence
  Probe
cggaacccaagcttagaactttaagcaacaagaccaccacttcgaaacctgggattcagg

SEQ ID NO: 1876 - DNA, 60 bp, Artificial Sequence
  Probe
aacatttgatcacagtttagaggcacagtggaccaagtggaaggcgatgcacaacagatt

SEQ ID NO: 1877 - DNA, 60 bp, Artificial Sequence
  Probe
aggaagaggaaatcaaagctagggagcaaagaattcgagagctggagttcactgtagccc

SEQ ID NO: 1878 - DNA, 60 bp, Artificial Sequence
  Probe
tgactctacagacaagctctattcttccgtggctgctcccacctgagtttactcatctga

SEQ ID NO: 1879 - DNA, 60 bp, Artificial Sequence
  Probe
tgaaatcaggtggaaatgacatctcgccgctttcagcatgctctattggttggaacagtt

SEQ ID NO: 1880 - DNA, 60 bp, Artificial Sequence
  Probe
cagggaaattgagggcatcattgtcatgcgccttgccattctaccatcttcttaagtgga

SEQ ID NO: 1881 - DNA, 60 bp, Artificial Sequence
  Probe
cctaaaggctgcctgcattccttggctcatgaactcttccttctttcactccaaacactt

SEQ ID NO: 1882 - DNA, 60 bp, Artificial Sequence
  Probe
agatgtcccaatgactaagaatgtgcgctggggacaagccaattctcttagtagaggctt

SEQ ID NO: 1883 - DNA, 60 bp, Artificial Sequence
  Probe
tggtgatgagttagtatggactacttgaacctcaaaactgggcctctcacccaaagccaa

SEQ ID NO: 1884 - DNA, 60 bp, Artificial Sequence
  Probe
tgtctttagtgtcctcactggtaaaatgaagaggctggccatgagctggaagggttaagt

SEQ ID NO: 1885 - DNA, 60 bp, Artificial Sequence
  Probe
ccacgttccgcagtcaaaccagcctcttgattgcttcctctctccttatccttctcatta

SEQ ID NO: 1886 - DNA, 60 bp, Artificial Sequence
  Probe
agatatttggcatgatcttcagtatgatcttgtgctgtgctatccgcaggaaccgcgaga

SEQ ID NO: 1887 - DNA, 60 bp, Artificial Sequence
  Probe
ggcagccaagaggaatttgggaagtagtgaaggagacctttaccccaggagtgttctatt

SEQ ID NO: 1888 - DNA, 60 bp, Artificial Sequence
  Probe
aagagggtgatttggaaaaggctcgcaaatcagcacaaacttgaaagccaagcatggaat

SEQ ID NO: 1889 - DNA, 60 bp, Artificial Sequence
  Probe
aacaagagcagtgaacctggaagtgacgaacgggggatagatgttgctttttgtcattgg

SEQ ID NO: 1890 - DNA, 60 bp, Artificial Sequence
  Probe
caaaactttgaacagcctcacagagcagaaggtgagtacctatctggcaccatctctcca

SEQ ID NO: 1891 - DNA, 60 bp, Artificial Sequence
  Probe
ctagctcaccagatcgagatcctcactagaacccccaagtgtagacactggacttgtgac

SEQ ID NO: 1892 - DNA, 60 bp, Artificial Sequence
  Probe
tcatccatgaaggtttccataaaagccgaaaggtgattgttgtggtgtcccagcacttca

SEQ ID NO: 1893 - DNA, 60 bp, Artificial Sequence
  Probe
gactgcaataccccagtctctgcctctgtttgcaaatgctctgcttctctgtatctctct

SEQ ID NO: 1894 - DNA, 60 bp, Artificial Sequence
  Probe
cacacatccagtcctgacatggagcttttcagtgtttggagacatttctcaatcccctgc

SEQ ID NO: 1895 - DNA, 60 bp, Artificial Sequence
  Probe
tccttgcctcctcaccctttctttcccctgaactctcaatccttcttcctttctcattcc

SEQ ID NO: 1896 - DNA, 60 bp, Artificial Sequence
  Probe
gtacttgtctgtgtgtttggtgtcctgagagaggtcagccaggaagcgacttggaaatat

SEQ ID NO: 1897 - DNA, 60 bp, Artificial Sequence
  Probe
caaatatcacagatgtggcaggtccctgaatctctacagggtgagtttctcaccctctgc

SEQ ID NO: 1898 - DNA, 60 bp, Artificial Sequence
  Probe
ctaacttacctctgtgacctgtttctgcaaccaggggtgttgcaatggatgcttttgtct

SEQ ID NO: 1899 - DNA, 60 bp, Artificial Sequence
  Probe
tgcataatccctgtcttcctatactctgtcccgctgggatgcccttaacaatttatgggg

SEQ ID NO: 1900 - DNA, 60 bp, Artificial Sequence
  Probe
gatgtctggcttcttcatcctatgacttagagcttcatccgtgctgttgtgtgtgtccgt

SEQ ID NO: 1901 - DNA, 60 bp, Artificial Sequence
  Probe
gaggagctggttgttaaagagcaaactcaggtagggaggaaacctgggacataagaccag

SEQ ID NO: 1902 - DNA, 60 bp, Artificial Sequence
  Probe
ccccaaaccgcatctctaaacagttcccacaatcacttctgctttgcttgtacgaaggag

SEQ ID NO: 1903 - DNA, 60 bp, Artificial Sequence
  Probe
tgtcctgggtttgaacccttgttcaatttgttctatgggaagctcctcctcctctctgag

SEQ ID NO: 1904 - DNA, 60 bp, Artificial Sequence
  Probe
acttgagtacaggaactagcttgcaacacagactctaagcccactcccatttcttccacc

SEQ ID NO: 1905 - DNA, 60 bp, Artificial Sequence
  Probe
tcaggtgtttatctcctctgcatttgtgtaatctccctgaaggtggataagccaagggca

SEQ ID NO: 1906 - DNA, 60 bp, Artificial Sequence
  Probe
catgcatgctatagtttcatgtgacccccaccagctttgatgtattacaccctgcccatt

SEQ ID NO: 1907 - DNA, 60 bp, Artificial Sequence
  Probe
aggctagggtagttccagagaaggcagtggaggtaacagaacaggccttgtaaaactttg

SEQ ID NO: 1908 - DNA, 60 bp, Artificial Sequence
  Probe
gaatcagaaacggtgacatttctcttgtggggtgtttgttctaggctacctcggacctga

SEQ ID NO: 1909 - DNA, 60 bp, Artificial Sequence
  Probe
aagctttgggtttgccaactgtgaaaagtgctcgaattgccaggaacacacaaatcatca

SEQ ID NO: 1910 - DNA, 60 bp, Artificial Sequence
  Probe
ctgcttctgttccaggcttgttagctggtggagaagcagtttatgggaaaagttgacgtc

SEQ ID NO: 1911 - DNA, 60 bp, Artificial Sequence
  Probe
aagtgcagttgtgagtagttagttacaaccagatacacgcagggtgcttaccccttcctg

SEQ ID NO: 1912 - DNA, 60 bp, Artificial Sequence
  Probe
cagccagaggaccagtctgcaagtgagataactcgggcatttgataccttagctaaagca

SEQ ID NO: 1913 - DNA, 60 bp, Artificial Sequence
  Probe
aattagggacttatttcaaatttggacatggctagtcgaggcgcaacaagacccaacggg

SEQ ID NO: 1914 - DNA, 60 bp, Artificial Sequence
  Probe
taacttccaggagttcctcattctggtgataaagatgggcgtggcagcccacaaaaaaag

SEQ ID NO: 1915 - DNA, 60 bp, Artificial Sequence
  Probe
cggtatggctagtgtagcacttaacattgcttggtgcttggtgacattcccaaacgttca

SEQ ID NO: 1916 - DNA, 60 bp, Artificial Sequence
  Probe
ggaagaaggggccagcctactttccctataagggataaaagtgggtctccaatgaccttc

SEQ ID NO: 1917 - DNA, 60 bp, Artificial Sequence
  Probe
cacactgggactgtttagacatgcatgccagttcatctgatgtgcacatctttgggatgt

SEQ ID NO: 1918 - DNA, 60 bp, Artificial Sequence
  Probe
cgcagaaaaccacacttctcaaaccttcactcaacacttccttccccaaagccagaagat

SEQ ID NO: 1919 - DNA, 60 bp, Artificial Sequence
  Probe
tttgggtaaaccagctctgaacttccaagctccaaatccaaggaaacatgcagctcttca

SEQ ID NO: 1920 - DNA, 60 bp, Artificial Sequence
  Probe
agagccttccaactggaatgaatccagtgggttgtgtttgtccatcaaactttgactccc

SEQ ID NO: 1921 - DNA, 60 bp, Artificial Sequence
  Probe
tgaagattggaggatgctgaaccacaaacacacaaggagaagagtacttcctctgcacca

SEQ ID NO: 1922 - DNA, 60 bp, Artificial Sequence
  Probe
actccttttggtttattcttaccaccttgcttctgtgttccttgggaatgctgctgtgct

SEQ ID NO: 1923 - DNA, 60 bp, Artificial Sequence
  Probe
gagcaaagccctctagcctcatcctcataaaaggtctcatcattttccctccagcctctt

SEQ ID NO: 1924 - DNA, 60 bp, Artificial Sequence
  Probe
ccagcaactactcactccctcaagatgacatcgatggcattcaggccatctatggtaagg

SEQ ID NO: 1925 - DNA, 60 bp, Artificial Sequence
  Probe
ctggctgtgaagctggacatcactgcagaaatcttagctgtgagagataagcaggagagg

SEQ ID NO: 1926 - DNA, 60 bp, Artificial Sequence
  Probe
cggaccatccagaatgacatcatgttattgcagctgagcagaagagtcagacggaatcga

SEQ ID NO: 1927 - DNA, 60 bp, Artificial Sequence
  Probe
gtggtaactttctcacaggccttggccacagatctgatcattacaattgcgtcagcagtg

SEQ ID NO: 1928 - DNA, 60 bp, Artificial Sequence
  Probe
catgaggaaactgagccctccgcagaagaagagtgtatgattctggaacagggtgaaact

SEQ ID NO: 1929 - DNA, 60 bp, Artificial Sequence
  Probe
tattttcttcttcagtgggccactgtcctgatcctgtgctggtgaatggagagttcagtt

SEQ ID NO: 1930 - DNA, 60 bp, Artificial Sequence
  Probe
agcaaggaacccagattacctcaaggtggcactctgggtactttttccttctgagtgatt

SEQ ID NO: 1931 - DNA, 60 bp, Artificial Sequence
  Probe
gaactacaacgtgagcctttattttgcctcgtctgcaactccatccttagcctttgcgtt

SEQ ID NO: 1932 - DNA, 60 bp, Artificial Sequence
  Probe
gagcgatgagttctatgactggtaaagaaaagggcctgctggtttccctcaggatctctg

SEQ ID NO: 1933 - DNA, 60 bp, Artificial Sequence
  Probe
cagagcaccatgtactgcctttaactttcctgtcatcctgtttgccatgctgcactgtaa

SEQ ID NO: 1934 - DNA, 60 bp, Artificial Sequence
  Probe
ccgcagtagtatagagctgaccaagatgctatgtgagatcttgaaagtgggcgagttgcc

SEQ ID NO: 1935 - DNA, 60 bp, Artificial Sequence
  Probe
ctaggggactacagaaggaaaaagacaagaggcagtaggatatctgtgtgtcctcccgct

SEQ ID NO: 1936 - DNA, 60 bp, Artificial Sequence
  Probe
catggtgtctcaggagatctgtgatggcgttcttaaaaaccaacagctgatggcaaagct

SEQ ID NO: 1937 - DNA, 60 bp, Artificial Sequence
  Probe
agatgacacacaactcctgcccaagtgatttgtcttccgtttgcactacctggtctaaga

SEQ ID NO: 1938 - DNA, 60 bp, Artificial Sequence
  Probe
caaagaattgaaccccgatccggttcacagaaaaataaactgctcacccgtctccacctg

SEQ ID NO: 1939 - DNA, 60 bp, Artificial Sequence
  Probe
ctttgaaaggtgtgagttggccagaactctgaaaagattgggaatggatggctacagggg

SEQ ID NO: 1940 - DNA, 60 bp, Artificial Sequence
  Probe
caccagtcagttctcccttgaagtaaacctcagtgcctgagacttttctaccaagccaca

SEQ ID NO: 1941 - DNA, 60 bp, Artificial Sequence
  Probe
gcgaaattctcacactattatgcaaattcagtgcaaaggcggcttgaaaggtgcactgca

SEQ ID NO: 1942 - DNA, 60 bp, Artificial Sequence
  Probe
cacacaaataccccacagcgtgaatatgcacatgtacgtcctgcatatacatgcaacgca

SEQ ID NO: 1943 - DNA, 60 bp, Artificial Sequence
  Probe
gtctccactggccaaggttgtggtcctcctttccagtatttttcttggatgactacagga

SEQ ID NO: 1944 - DNA, 60 bp, Artificial Sequence
  Probe
cacctaagcttccatgtagccctcatccagggaagttttgcgatcctttaggaagacact

SEQ ID NO: 1945 - DNA, 60 bp, Artificial Sequence
  Probe
acacacaacaaaacatctgctgtcctgggtgggagggaaacttcatttcactggaatgag

SEQ ID NO: 1946 - DNA, 60 bp, Artificial Sequence
  Probe
agacccagagagtgacttgcccaatatcacacagctgttaactgacaggactgggatttg

SEQ ID NO: 1947 - DNA, 60 bp, Artificial Sequence
  Probe
ccaccttgagccatcatggggggagttggacagcatttacttgtcagtgaatttggtaag

SEQ ID NO: 1948 - DNA, 60 bp, Artificial Sequence
  Probe
gaagtgggcccataaaaggccctcacattttaggagtaaaactgtgggctaagcaccttt

SEQ ID NO: 1949 - DNA, 60 bp, Artificial Sequence
  Probe
gtgtgtttctctgtacctgcatttgcacatgtgtagtgtgtgcacgtgtctgtgtgtgaa

SEQ ID NO: 1950 - DNA, 60 bp, Artificial Sequence
  Probe
ccttccttgttccctagccccaatctgggatacattcaatcaatctacagggtctgcaca

SEQ ID NO: 1951 - DNA, 60 bp, Artificial Sequence
  Probe
cagtggctagctaaggatggatatttcaggatggatctgtggaatggttactgggcccag

SEQ ID NO: 1952 - DNA, 60 bp, Artificial Sequence
  Probe
tagaatgggacaagattagggtcaacctcaggctgtcctgtaggcttttggggattttgt

SEQ ID NO: 1953 - DNA, 60 bp, Artificial Sequence
  Probe
ctgaggtaagggccctgtgctccaggaaatagctaagagaccagtacagctagagctaaa

SEQ ID NO: 1954 - DNA, 60 bp, Artificial Sequence
  Probe
atttttcctgactggttcccagagtacaaagcacaggacaacttcgctaactcaccctga

SEQ ID NO: 1955 - DNA, 60 bp, Artificial Sequence
  Probe
gtgtgtgacattccaggggtcgtttgcttttcagggttttctgagggaaagtgcatatga

SEQ ID NO: 1956 - DNA, 60 bp, Artificial Sequence
  Probe
gacctctacagcaccagcatttcctggaagctctgcccataattagttttgcagaagtgc

SEQ ID NO: 1957 - DNA, 60 bp, Artificial Sequence
  Probe
ttgaatcagggctggtgtcagttggatcagggtggtagggaaaggaggaaatggataaat

SEQ ID NO: 1958 - DNA, 60 bp, Artificial Sequence
  Probe
tctgacctaagagcctggagctgaagggctcatctcatctctgtatttacttcctggctc

SEQ ID NO: 1959 - DNA, 60 bp, Artificial Sequence
  Probe
attgttcaaggaacagtctgaaggccagtgtgaatggagcagagtgaaccaggcaaaaat

SEQ ID NO: 1960 - DNA, 60 bp, Artificial Sequence
  Probe
tagcagaaggtcagctttcacagttatttcccactgagaagaggcgctttgatactgcca

SEQ ID NO: 1961 - DNA, 60 bp, Artificial Sequence
  Probe
ccgtacaatgtgggcaccacccatctacaccatttctcaaattctctgtgcatgcagatc

SEQ ID NO: 1962 - DNA, 60 bp, Artificial Sequence
  Probe
gtcaggaggtcttgagaattagactggagagggaatttgggcctggttcttggaaaacct

SEQ ID NO: 1963 - DNA, 60 bp, Artificial Sequence
  Probe
tacttagccagtttccagccttccagatgatctttgccctctgggtcttgacccattaag

SEQ ID NO: 1964 - DNA, 60 bp, Artificial Sequence
  Probe
atttgacacaagagaaaagcaggaggaaaaggggccattctccaaaggacctgaaagagc

SEQ ID NO: 1965 - DNA, 60 bp, Artificial Sequence
  Probe
agtcttcaccagggtctcaagtttcctgccctggataaggacaacaatgagaagcttcaa

SEQ ID NO: 1966 - DNA, 60 bp, Artificial Sequence
  Probe
tgttccctgctccccttcctcttcttgtgtctgtatctccagctaccatttagtcagtca

SEQ ID NO: 1967 - DNA, 60 bp, Artificial Sequence
  Probe
gtatgcatttgtgtgtgcacgcctgtgtaagtgtgtatgcaggtctgaacaggtgcatat

SEQ ID NO: 1968 - DNA, 60 bp, Artificial Sequence
  Probe
gtcaaaaagaccggcccaatagcttctcagcgggtatcctccagagaggtaaagtgaaat

SEQ ID NO: 1969 - DNA, 60 bp, Artificial Sequence
  Probe
catacctgctaaagaaactatcctgatggatttagcagcatggccatgaggcattggcgg

SEQ ID NO: 1970 - DNA, 60 bp, Artificial Sequence
  Probe
tgagagggcaaggtctctgggaggtaggagataagaagaggatggattcactttgggatg

SEQ ID NO: 1971 - DNA, 60 bp, Artificial Sequence
  Probe
cctatactgacctgagacagaggcagcagtgatacccacctgagagatcctgtgtttgaa

SEQ ID NO: 1972 - DNA, 60 bp, Artificial Sequence
  Probe
gaccaccataaactctgctaggggatctctaaaaaggagtcaggcttatggggctttgca

SEQ ID NO: 1973 - DNA, 60 bp, Artificial Sequence
  Probe
gagggtactgaggtaacctatgaggccgaaagccagagacaaccctttgttaaatacgcc

SEQ ID NO: 1974 - DNA, 60 bp, Artificial Sequence
  Probe
tgtctcgaaccctggtctaaagtgatcttcccgcctagcctcccaaaatgttggaattac

SEQ ID NO: 1975 - DNA, 60 bp, Artificial Sequence
  Probe
agcccccttgcttttgtatctgtgaggtgaatgagggtctgtcacccaaatctacttctc

SEQ ID NO: 1976 - DNA, 60 bp, Artificial Sequence
  Probe
atcggagacaacaccacagtggactacactttgttcgagtctttgtgctccaagaaggac

SEQ ID NO: 1977 - DNA, 60 bp, Artificial Sequence
  Probe
ttgaggttcgaatgatgtgcgatgtgtaatgagacagaagccactgcatttttccacccc

SEQ ID NO: 1978 - DNA, 60 bp, Artificial Sequence
  Probe
gggctgcattttattgggccggcaagtaactttaaatcccagctcacactctactgagtg

SEQ ID NO: 1979 - DNA, 60 bp, Artificial Sequence
  Probe
cccagttgaagatggggaaaccaggaaatgtgccatcagatactaagtggagtcaaggga

SEQ ID NO: 1980 - DNA, 60 bp, Artificial Sequence
  Probe
tggctgaactgctctacagagtgaggcgatttgacctgctcaaacgtatcttgaagatgg

SEQ ID NO: 1981 - DNA, 60 bp, Artificial Sequence
  Probe
gagggcttaataccaagagaacaagtgaagtgggagaagcagggctaaactttcagggga

SEQ ID NO: 1982 - DNA, 60 bp, Artificial Sequence
  Probe
aaatcacgtggacccctctcatgacctgaaaggaagcgtggtcatttatgatgttctgga

SEQ ID NO: 1983 - DNA, 60 bp, Artificial Sequence
  Probe
caagaccaaatgggatacctgtctcttccagtcccaggacaaatgtggttcagaagggat

SEQ ID NO: 1984 - DNA, 60 bp, Artificial Sequence
  Probe
atctgccaggactggcagttctgatttagttaggagagagccgctgataggttaggtctc

SEQ ID NO: 1985 - DNA, 60 bp, Artificial Sequence
  Probe
gtacctaatgcccagccagctttggaaggccgtacaagttttcccgaggatactgtaata

SEQ ID NO: 1986 - DNA, 60 bp, Artificial Sequence
  Probe
ttacccttagtctcagttcccaccaagacacagagcatttcctgtgccttttccgctatt

SEQ ID NO: 1987 - DNA, 60 bp, Artificial Sequence
  Probe
tgttttaagcagggcaatgtcgtggccaaattcatgtttgaaaagtaccctttgacggcc

SEQ ID NO: 1988 - DNA, 60 bp, Artificial Sequence
  Probe
tgtgagtggatacatgtacagcgtcccacagtgcctggcacgcaagaagtgttatataag

SEQ ID NO: 1989 - DNA, 60 bp, Artificial Sequence
  Probe
agcagtctactagtgactttactgccacaaccagaaaagccagctgatgtgtcagacgtg

SEQ ID NO: 1990 - DNA, 60 bp, Artificial Sequence
  Probe
tgatgcccagagaagggataccatttgcctgagccttctcagtactgtttaatcagcctg

SEQ ID NO: 1991 - DNA, 60 bp, Artificial Sequence
  Probe
aattgtaagtaatgatacagagggatcttgtgtacccttcacccagcctcccccaatggc

SEQ ID NO: 1992 - DNA, 60 bp, Artificial Sequence
  Probe
ttacttcctcctgtctagtcggtttggtccctttagggctccggatatctttggtgactt

SEQ ID NO: 1993 - DNA, 60 bp, Artificial Sequence
  Probe
actggagacgcggcctctaagagaggttgaaactgtgtgtgtgtgggagaaaatgataac

SEQ ID NO: 1994 - DNA, 60 bp, Artificial Sequence
  Probe
ctgaggaagattataactttgtcttcaaggtggtgctgatcggcgaatcaggtgtgggga

SEQ ID NO: 1995 - DNA, 60 bp, Artificial Sequence
  Probe
aggcctgtttcacagatggttgtgtacggaggttctcatgctgccaagttaacatagagt

SEQ ID NO: 1996 - DNA, 60 bp, Artificial Sequence
  Probe
ttaccagcagaactctctaaaggattgcttcaagtctctggacaccaccttgcagttccc

SEQ ID NO: 1997 - DNA, 60 bp, Artificial Sequence
  Probe
ccacaacagcattcaggactgtagaggagaccaccactgcctgttttctggagagtttag

SEQ ID NO: 1998 - DNA, 60 bp, Artificial Sequence
  Probe
tttttctcctattaaagggccttgagggatggagctctattcagagtgccagctgtgctc

SEQ ID NO: 1999 - DNA, 60 bp, Artificial Sequence
  Probe
cacattggtttcctcctgagaagagtcaacagagtccagcatcttcttccaaggtcaggg

SEQ ID NO: 2000 - DNA, 60 bp, Artificial Sequence
  Probe
ttctttcttctcttcatttagggtcacacacactccgggaccatggagggaggtatcaga

SEQ ID NO: 2001 - DNA, 60 bp, Artificial Sequence
  Probe
tcgaaggaggcactccacttttcacactcaggaaaactggtggtaaagaagttctcctgg

SEQ ID NO: 2002 - DNA, 60 bp, Artificial Sequence
  Probe
cattcccgagctcatgtaccgcactcaagatcaaggatacactggacattgaagggtgag

SEQ ID NO: 2003 - DNA, 60 bp, Artificial Sequence
  Probe
ggtgacttagatgtgtgttaaagttgaaggccgccgatctagagaaacgtggctgcctat

SEQ ID NO: 2004 - DNA, 60 bp, Artificial Sequence
  Probe
ttcctcttgtttgtgtgatccttgtgacatctgacttgggtgacatgcttcctctgtgga

SEQ ID NO: 2005 - DNA, 60 bp, Artificial Sequence
  Probe
atggaatcccatagaaacaccccaaatctaacttgatccaggaccagccagtggtcactt

SEQ ID NO: 2006 - DNA, 60 bp, Artificial Sequence
  Probe
gtagagattttttgagtttcagtctccacttgggaaggttccttggccccttctctccca

SEQ ID NO: 2007 - DNA, 60 bp, Artificial Sequence
  Probe
caggcatcttccttgcactggatgtggtcaaccttgtatacgagtcaaagcacttgcatg

SEQ ID NO: 2008 - DNA, 60 bp, Artificial Sequence
  Probe
gcgagtgtgtctgtaaaacaccatgtcccaaagatctaatccagcaccccaaaaactgca

SEQ ID NO: 2009 - DNA, 60 bp, Artificial Sequence
  Probe
gaggagggagaaatggccaccacatcaccccagagaaatttctggaatctgattgagtct

SEQ ID NO: 2010 - DNA, 60 bp, Artificial Sequence
  Probe
gggagctctttagtcgtctaggagatgaagagaaaagagcaaagcttgcagaggctgcag

SEQ ID NO: 2011 - DNA, 60 bp, Artificial Sequence
  Probe
aatgatcatagtgtccgcttcagggtggtttatgaggcttaaagggaagaagctcaggca

SEQ ID NO: 2012 - DNA, 60 bp, Artificial Sequence
  Probe
cacatctcatatgcacaagacacctcacactcaggacacctcatgctcaaagaagcctca

SEQ ID NO: 2013 - DNA, 60 bp, Artificial Sequence
  Probe
gtgagtgtgattctagaagaggatgcattccatggatccagcaccctgacagaggtttcc

SEQ ID NO: 2014 - DNA, 60 bp, Artificial Sequence
  Probe
ttgccaccactataacctcatcatggctcaccttcctgctgcttctcaactactgttctg

SEQ ID NO: 2015 - DNA, 60 bp, Artificial Sequence
  Probe
ctctgggtggctgattagctgagggtaaccttcatatagctggcatgggatttccagatg

SEQ ID NO: 2016 - DNA, 60 bp, Artificial Sequence
  Probe
ggagtctcatgcaccacctatcacactccctcacatcctgtttctgactttggaatggac

SEQ ID NO: 2017 - DNA, 60 bp, Artificial Sequence
  Probe
acaatggagtgggattgagactgtggtttagagcctttgatttcctggactggactgacg

SEQ ID NO: 2018 - DNA, 60 bp, Artificial Sequence
  Probe
aaaactggcagcagcaagtacaaagggcttgaggcaggaattaccttccaggtatttcag

SEQ ID NO: 2019 - DNA, 60 bp, Artificial Sequence
  Probe
aaatcactgccaccacttctctccccagcttcagtacctttatggacaactacagcacag

SEQ ID NO: 2020 - DNA, 60 bp, Artificial Sequence
  Probe
aggacctctattctgtaggggctaaggtgggctgcatatataaccagcacttggttctct

SEQ ID NO: 2021 - DNA, 60 bp, Artificial Sequence
  Probe
ccagttcccacctctgtgacaataggatcatggccttacccttgaagcattaccgagaag

SEQ ID NO: 2022 - DNA, 60 bp, Artificial Sequence
  Probe
cgggtgcattgaataagagcagtccagcaatctgattcctaggcctctaccgaaaaggat

SEQ ID NO: 2023 - DNA, 60 bp, Artificial Sequence
  Probe
agagagtgaggatgaggagagctatgacacagagtcagagttcacggagttcacagagga

SEQ ID NO: 2024 - DNA, 60 bp, Artificial Sequence
  Probe
gtgctcacagttacacaggacgacagggtcaagaatttgctcaattgaacacctgccatt

SEQ ID NO: 2025 - DNA, 60 bp, Artificial Sequence
  Probe
gaatgaaggtgtttctagagtcagagtcctcagtgaaccctggcatcctgagatccagga

SEQ ID NO: 2026 - DNA, 60 bp, Artificial Sequence
  Probe
ggagctcactgcccctgaaggcaacagttgcattcttagacacctgtgatcaatgaaaag

SEQ ID NO: 2027 - DNA, 60 bp, Artificial Sequence
  Probe
cttttggaaagagagggcctaaacaggatcagcattgatgccaagcaacacaagggagaa

SEQ ID NO: 2028 - DNA, 60 bp, Artificial Sequence
  Probe
cagtaattccatgagcacaggcccattatagtgggcgcttcatttgccatcaagtgagtc

SEQ ID NO: 2029 - DNA, 60 bp, Artificial Sequence
  Probe
caggtttgaaccactgcacccggccagtaaaagaaattttgaaggccattgcagctattt

SEQ ID NO: 2030 - DNA, 60 bp, Artificial Sequence
  Probe
gatggtctcctttgagctctttctggccaaagtcgagtgtgagcagatgctagaaatcca

SEQ ID NO: 2031 - DNA, 60 bp, Artificial Sequence
  Probe
ttctccagagggaattgcagagtactggctgatggagtaaatcgctaccttttgctgtgg

SEQ ID NO: 2032 - DNA, 60 bp, Artificial Sequence
  Probe
gcccaaggttcagagtcacccatctcagcaagcccagaagtatctgcaatatctacgatg

SEQ ID NO: 2033 - DNA, 60 bp, Artificial Sequence
  Probe
taaacagtgattgtgaccagggacatagaatgggatgattggcccgaggtaaccatggtt

SEQ ID NO: 2034 - DNA, 60 bp, Artificial Sequence
  Probe
ctcccaggggaatttggcaatgtctggagacactttttattgtcatgactggggagttgc

SEQ ID NO: 2035 - DNA, 60 bp, Artificial Sequence
  Probe
aggcgaaggagatagaaggagaggcaggagagataggtaaggccagagatcggataagag

SEQ ID NO: 2036 - DNA, 60 bp, Artificial Sequence
  Probe
gaaggtctgagacacccatcggccaaccctaactcatcctgtcttctctctctagttcac

SEQ ID NO: 2037 - DNA, 60 bp, Artificial Sequence
  Probe
gtctgggagaattgatcttgcctgaaaatgaaccaggaagcagtatcatgccaggcaagg

SEQ ID NO: 2038 - DNA, 60 bp, Artificial Sequence
  Probe
catgtttccaaaccaaagagcatgtttgctttgtaatggaatatgctgccggtggggacc

SEQ ID NO: 2039 - DNA, 60 bp, Artificial Sequence
  Probe
tcactcagggtgatgttgggctcgctatggggaaactatatggaaatgacttcagccaaa

SEQ ID NO: 2040 - DNA, 60 bp, Artificial Sequence
  Probe
aagaagggccaactaaattaggatggccagggaattggcctgggtttaggacctatgtat

SEQ ID NO: 2041 - DNA, 60 bp, Artificial Sequence
  Probe
cagtcggatgtctactcctatggcatcgtattgtatgaactgatcacgggggagcttcct

SEQ ID NO: 2042 - DNA, 60 bp, Artificial Sequence
  Probe
aaatatagcgaaatctctccactgccttctgtccaccaacatttagtgccagcctaggca

SEQ ID NO: 2043 - DNA, 60 bp, Artificial Sequence
  Probe
aaatccaagtgaccagggaagttaaaagtattcctgacggtgcaaaaagccgctcagcaa

SEQ ID NO: 2044 - DNA, 60 bp, Artificial Sequence
  Probe
gtcatcacggatggagaaaagtttggcgatcccttgggatatgaggatgtcatccctgag

SEQ ID NO: 2045 - DNA, 60 bp, Artificial Sequence
  Probe
gtcctgggtcattctcttccaaacaggagatccatcattgtcacggctctgcagtgtaat

SEQ ID NO: 2046 - DNA, 60 bp, Artificial Sequence
  Probe
ttctgtgaatcccggagtctgcaaatgagttatagaaagctgttgaggcctgaggtgctt

SEQ ID NO: 2047 - DNA, 60 bp, Artificial Sequence
  Probe
tagtaggcttgcagccccagttggttagcatgactaacagtccacagaatgagttggatg

SEQ ID NO: 2048 - DNA, 60 bp, Artificial Sequence
  Probe
taatggcagtaacagggcagttcattccaaatccagcactgctgtttaccttgcagaagg

SEQ ID NO: 2049 - DNA, 60 bp, Artificial Sequence
  Probe
ggcactgaagatggtgaagatggagcctgatgatgatgtctccacccttcagaaggaaat

SEQ ID NO: 2050 - DNA, 60 bp, Artificial Sequence
  Probe
ttacttaggttactgcttctgtggatggatcgtgctggggccttaccatgacaagtttcg

SEQ ID NO: 2051 - DNA, 60 bp, Artificial Sequence
  Probe
tttcactccggagtgagaagctttgccctcctaagagagagagacagagagacagagaga

SEQ ID NO: 2052 - DNA, 60 bp, Artificial Sequence
  Probe
cttcaagaacgtacatggatcctgattttctcacgaagtcccgatggaaccctgtgctgt

SEQ ID NO: 2053 - DNA, 60 bp, Artificial Sequence
  Probe
caggccccagactgtgtaaatgtctgagtggcatgatcagctatcaagtctccaagtcac

SEQ ID NO: 2054 - DNA, 60 bp, Artificial Sequence
  Probe
ttttgtgcctgtttgcctttgctcatcctgtgttatctgcctggaatgtcttccctcatt

SEQ ID NO: 2055 - DNA, 60 bp, Artificial Sequence
  Probe
tgttcttcctcctttccccaggtgtgtttccctcacctccaatttcctcttttcagaagt

SEQ ID NO: 2056 - DNA, 60 bp, Artificial Sequence
  Probe
aaagaaactgcccttgttgggccctcaaaggacagccctggtggtattaaaataaagacg

SEQ ID NO: 2057 - DNA, 60 bp, Artificial Sequence
  Probe
actcattgctctcaaattacctgtctgtcttcactgctcctctcaggagacccctatgct

SEQ ID NO: 2058 - DNA, 60 bp, Artificial Sequence
  Probe
cctacaaaaaatggcgtggaaccaaagcgacccagccgaccaattaatatcacctcactt

SEQ ID NO: 2059 - DNA, 60 bp, Artificial Sequence
  Probe
aaatggtgagcagaggactcatttcccaaagacagctggaacagaaataggcactccaga

SEQ ID NO: 2060 - DNA, 60 bp, Artificial Sequence
  Probe
ctgttgtctttgatccactccaggtggggagggacgacctcagaacagtaattcacaatg

SEQ ID NO: 2061 - DNA, 60 bp, Artificial Sequence
  Probe
atcgtatgggacctttggcacttgatttagtctggtctcagggccagaatcatcttgcat

SEQ ID NO: 2062 - DNA, 60 bp, Artificial Sequence
  Probe
aggcagacatcagctcctggttcaacgaggccattgacttcataggtaaatggaatggat

SEQ ID NO: 2063 - DNA, 60 bp, Artificial Sequence
  Probe
aggtttgctgtacttagtcgcggagttcattcttcagtggcttctgctacatctgttgca

SEQ ID NO: 2064 - DNA, 60 bp, Artificial Sequence
  Probe
gagactggagtatgtgatgatgccacacactaaaggtgtgcttcttgcccaggtaactgt

SEQ ID NO: 2065 - DNA, 60 bp, Artificial Sequence
  Probe
tgatgacactgggtgactctgatcatccagaataaccctcacatctccagacgcttcact

SEQ ID NO: 2066 - DNA, 60 bp, Artificial Sequence
  Probe
gggaagaattgattgttggatggctcccaccttccagctcaggagttttgatttgacagg

SEQ ID NO: 2067 - DNA, 60 bp, Artificial Sequence
  Probe
ctgtcagctgaagtaggatggctttagctcagggggctactcaacatttgctgtcatctt

SEQ ID NO: 2068 - DNA, 60 bp, Artificial Sequence
  Probe
caggaactgccttattaacccagtccctcatgaaaatggaggtgaaattggcctgctgtg

SEQ ID NO: 2069 - DNA, 60 bp, Artificial Sequence
  Probe
ctcttaccagatttcaatggagatgctggaggattcctctggaaggcaaagagccgtgag

SEQ ID NO: 2070 - DNA, 60 bp, Artificial Sequence
  Probe
aggcaatttgatttagatgaggtaatgggccaggggctctcatgatgggatcgatgtctt

SEQ ID NO: 2071 - DNA, 60 bp, Artificial Sequence
  Probe
ttcctggttaagcaggcattgctttgccctggagcagctattttaagccatctcagattc

SEQ ID NO: 2072 - DNA, 60 bp, Artificial Sequence
  Probe
gttctgcttctccctgcagaaaagcagcattttcggaagctgaagaataagctagcccag

SEQ ID NO: 2073 - DNA, 60 bp, Artificial Sequence
  Probe
ccaaaacttggcaagggtgatgtaaaggataagtttgaagccatgcagagagccagggaa

SEQ ID NO: 2074 - DNA, 60 bp, Artificial Sequence
  Probe
caacaactgcaacagcttcaacagcagaatctcaacctgcaacagtttgtgttggtgcat

SEQ ID NO: 2075 - DNA, 60 bp, Artificial Sequence
  Probe
aaagacacttctggaattagtggaggcatggctggaaagaactccaggtttagagccaca

SEQ ID NO: 2076 - DNA, 60 bp, Artificial Sequence
  Probe
tgaaatctgaagacctcgagcagatgatgccaacctctggagcaatgttgcttaggatgt

SEQ ID NO: 2077 - DNA, 60 bp, Artificial Sequence
  Probe
tctgtatgtcatgcttcttccgtaggtttggcttgcatgatgtcaggagttccggaagtc

SEQ ID NO: 2078 - DNA, 60 bp, Artificial Sequence
  Probe
gaatgcagtgcagggttggattaacaaggtggaaagaattcgagggttccaccaagtagc

SEQ ID NO: 2079 - DNA, 60 bp, Artificial Sequence
  Probe
agggtataggcttaaggtcaggaagacctggacccaaatcctggactcctcaatgagaag

SEQ ID NO: 2080 - DNA, 60 bp, Artificial Sequence
  Probe
gtctcttgactctttccgcctttgtttacaaccctgccatgatctccctcttgcaaaagc

SEQ ID NO: 2081 - DNA, 60 bp, Artificial Sequence
  Probe
cccataatcagcaatgatgtctgcaatggcgctgacttctatggaaaccagatcaagccc

SEQ ID NO: 2082 - DNA, 60 bp, Artificial Sequence
  Probe
agaaggtccatgtggctgggacaaaatgatatagtgggtgatggagctggaggaaaaagt

SEQ ID NO: 2083 - DNA, 60 bp, Artificial Sequence
  Probe
tgtgtgttgcatgagaaaacgccagtaagtgacagagtcaccaaatgctgcacagaatcc

SEQ ID NO: 2084 - DNA, 60 bp, Artificial Sequence
  Probe
gatgtgtgatatcatctatgccggtgagaaggcccagtttgcacagccggagatcttaat

SEQ ID NO: 2085 - DNA, 60 bp, Artificial Sequence
  Probe
tggagcctaaggtttaggctcacccatttcaaccagtctagcagcatctgcaacatctac

SEQ ID NO: 2086 - DNA, 60 bp, Artificial Sequence
  Probe
cccactttacagaggaggacactgaggctcagagacaccgtaggaaagtggacgatttaa

SEQ ID NO: 2087 - DNA, 60 bp, Artificial Sequence
  Probe
tggctatggatcccatggtccattattgcctttaccaagtcgttacagaatgggctctcg

SEQ ID NO: 2088 - DNA, 60 bp, Artificial Sequence
  Probe
atgctgtatggcctgccgcctttttatagccgaaacacagctgaaatgtacgacaacatt

SEQ ID NO: 2089 - DNA, 60 bp, Artificial Sequence
  Probe
gtaaactctccggtccccaaaggttgttaactaggtccgctttcatgtgcatcagacagt

SEQ ID NO: 2090 - DNA, 60 bp, Artificial Sequence
  Probe
aaaacagaaagaacccagtggcccaactgaatggagacaaagccaaggtggctagaattt

SEQ ID NO: 2091 - DNA, 60 bp, Artificial Sequence
  Probe
ttctgctaggctagcaaaagggagaatagcctaggtccgtggatgatgttttgatgcacg

SEQ ID NO: 2092 - DNA, 60 bp, Artificial Sequence
  Probe
tgacattcagaaaggctgacccagctttggaactctgcttggtttgtttgttcgttcctt

SEQ ID NO: 2093 - DNA, 60 bp, Artificial Sequence
  Probe
tatttgacatcctggggttacagcacgctaaagggcacccactgtccttaacagagaaaa

SEQ ID NO: 2094 - DNA, 60 bp, Artificial Sequence
  Probe
cacctctacatcctctgcattcttggccaggctctgagagggcattggtaaatgttaact

SEQ ID NO: 2095 - DNA, 60 bp, Artificial Sequence
  Probe
aaccaccagcaccttgtgctcatgtacttgcccatgtctgatggaagaaacatactctct

SEQ ID NO: 2096 - DNA, 60 bp, Artificial Sequence
  Probe
ttgaagcccaggcggagacttcagattcctttgcatgtagaagtgttggccaaaaatagc

SEQ ID NO: 2097 - DNA, 60 bp, Artificial Sequence
  Probe
agaatagaatagtacctggaggtggaaagggagacgggaacaaatgtggggaaaggagga

SEQ ID NO: 2098 - DNA, 60 bp, Artificial Sequence
  Probe
gaggcgtgtccctggcagagagagaatgtgttcagtgacaacagctcatatttgttgagt

SEQ ID NO: 2099 - DNA, 60 bp, Artificial Sequence
  Probe
ctctcaggatcagcctcattgctttccatagttcagcgacactaagcttgggtcagttcc

SEQ ID NO: 2100 - DNA, 60 bp, Artificial Sequence
  Probe
cgttgtcactggagtgtgtgtgccgtgacaccttttttcatttaatactgcgtctgtggg

SEQ ID NO: 2101 - DNA, 60 bp, Artificial Sequence
  Probe
tagagttcccatcactccacactgtccagtgacaactcccaacatggaagatctgctagt

SEQ ID NO: 2102 - DNA, 60 bp, Artificial Sequence
  Probe
ttacacagccaactggtcagtggtacagcctggatttcatctctgggtgtttattcctgg

SEQ ID NO: 2103 - DNA, 60 bp, Artificial Sequence
  Probe
caatgcagccccatatgattcagcagaagtgggtagcagttgggtttgattagtcttggc

SEQ ID NO: 2104 - DNA, 60 bp, Artificial Sequence
  Probe
ccaagaagcctcctgggctaagcctgaattttgtctcttgtctaccctgcactacaatca

SEQ ID NO: 2105 - DNA, 60 bp, Artificial Sequence
  Probe
atgtcatgaactactggaaggacaatggagcaccagctgagaagctcatcgttggattcc

SEQ ID NO: 2106 - DNA, 60 bp, Artificial Sequence
  Probe
catctctgcaatagtccttggaggcaccaaagtcagggaagacgtcgatgtcattgagtg

SEQ ID NO: 2107 - DNA, 60 bp, Artificial Sequence
  Probe
aatcatgccaacatcctgaccaagcccgatccaagaaccttctggactaatgatgatcca

SEQ ID NO: 2108 - DNA, 60 bp, Artificial Sequence
  Probe
gctatcctgttggcctgtgttgtggttttgaagtttgtactttctctgtgggtgccagtt

SEQ ID NO: 2109 - DNA, 60 bp, Artificial Sequence
  Probe
ctggctcgaccgaaaccagatggcagagaaagatgagtatgaacacaagcagaaagagct

SEQ ID NO: 2110 - DNA, 60 bp, Artificial Sequence
  Probe
ttgtatgtcatccttcaggcctcaaccaactacttgccctctacctgctgaagtttctgc

SEQ ID NO: 2111 - DNA, 60 bp, Artificial Sequence
  Probe
ggaggcagcccaccagttatttttatgccgtttaaccgtaggaagtcacttagacaccct

SEQ ID NO: 2112 - DNA, 60 bp, Artificial Sequence
  Probe
aacagagggcgcatttggagaggtaatgagctggagttcatgtgttcacactcatggtaa

SEQ ID NO: 2113 - DNA, 60 bp, Artificial Sequence
  Probe
attcactcgaagaaagcttcccagagcaggtgttagggttagaccagttagggggagtag

SEQ ID NO: 2114 - DNA, 60 bp, Artificial Sequence
  Probe
tgcctcacattcagcaggttcaaaaccaaacttcaatgctttcacgtttcaccctctcct

SEQ ID NO: 2115 - DNA, 60 bp, Artificial Sequence
  Probe
ggatgaacagtcctggttccgggagactgagatctataacacagtgttgctcagacacga

SEQ ID NO: 2116 - DNA, 60 bp, Artificial Sequence
  Probe
attagagttggccagtcactacaacttgcctcccttacgctttttctcgagttggtcacc

SEQ ID NO: 2117 - DNA, 60 bp, Artificial Sequence
  Probe
ccatgtcctcagggtctagagtgggggcaatttcttataacctcaacattcagggttggg

SEQ ID NO: 2118 - DNA, 60 bp, Artificial Sequence
  Probe
tctgggctgtagtttccccatccgtaaaatggggataatagtgcctgccttgaattgtca

SEQ ID NO: 2119 - DNA, 60 bp, Artificial Sequence
  Probe
taccattagggtgacgctcgtgtgcatcttctgtggctgatgggtaaattaaacaggacg

SEQ ID NO: 2120 - DNA, 60 bp, Artificial Sequence
  Probe
ctcactgtccctttcaggaccaaaatactgggtgtatccatctgcaggtaccaatggctt

SEQ ID NO: 2121 - DNA, 60 bp, Artificial Sequence
  Probe
gcattaaagccaaagtgactttgcagaaacctggggaaagtagtggagaagggcttaggc

SEQ ID NO: 2122 - DNA, 60 bp, Artificial Sequence
  Probe
tctcagaaaccacccccatcccacagaaatatcccaacaccaaagagatcaacacagtcc

SEQ ID NO: 2123 - DNA, 60 bp, Artificial Sequence
  Probe
caactcaggcacacctacacagacgcataaaacagactctccaaccacccacttatagcc

SEQ ID NO: 2124 - DNA, 60 bp, Artificial Sequence
  Probe
gagtccatgaagaagatggctcctgccatggaatcccctactctactgtgtgtagcctta

SEQ ID NO: 2125 - DNA, 60 bp, Artificial Sequence
  Probe
tacacactcatgaactcctgatggaacaataacaggcccaagcctgtggtatgatgtgca

SEQ ID NO: 2126 - DNA, 60 bp, Artificial Sequence
  Probe
acttccgcccacccactacaaacgtcgagagaaattcgtagatgaggccttgtcaaaatt

SEQ ID NO: 2127 - DNA, 60 bp, Artificial Sequence
  Probe
ctcaccaagtttttcatgaggacgatccgtcagcatctgttctggtctctggtttcccat

SEQ ID NO: 2128 - DNA, 60 bp, Artificial Sequence
  Probe
cagggctctccagaacacacaaatggaaacttgcaggcatttttaacaggccccaaattg

SEQ ID NO: 2129 - DNA, 60 bp, Artificial Sequence
  Probe
gaaatagccaccatgtagtgggttctcaccacatgacagacacggtgctgctataagctt

SEQ ID NO: 2130 - DNA, 60 bp, Artificial Sequence
  Probe
gaaaccagagaactctaggtggaatgtggtaacttttgccagggcagagggaacacctac

SEQ ID NO: 2131 - DNA, 60 bp, Artificial Sequence
  Probe
cagagtcttcctgatgaggcatttcctgttcgcctgagagcaattcctcacagaagatgg

SEQ ID NO: 2132 - DNA, 60 bp, Artificial Sequence
  Probe
gaaacagtatgtggggtcagactgcatggattctgcttcgacttaccagctgtgtgttct

SEQ ID NO: 2133 - DNA, 60 bp, Artificial Sequence
  Probe
agagctctggacaagcaggcagatcataaggacagagagcttactgtgcttctaccaact

SEQ ID NO: 2134 - DNA, 60 bp, Artificial Sequence
  Probe
ctgcttgggcaaaggggaacattctctgggtcagatttgtggttttagaagctgttctgg

SEQ ID NO: 2135 - DNA, 60 bp, Artificial Sequence
  Probe
ggctgaggtttttaaggggattagggagagcgaggggttagaaaattggggtcattgagt

SEQ ID NO: 2136 - DNA, 60 bp, Artificial Sequence
  Probe
tggaactgtggttgccgttgaaagacccagcatgtaatatctttctgatggcaaagtgcg

SEQ ID NO: 2137 - DNA, 60 bp, Artificial Sequence
  Probe
cgagagctgcagatcatgcgtaagctggaccactgcaatattgtgaggctgagatacttt

SEQ ID NO: 2138 - DNA, 60 bp, Artificial Sequence
  Probe
acccatgttactggggagtgatggataaatacgcagccgaagcactactggaaggaaaac

SEQ ID NO: 2139 - DNA, 60 bp, Artificial Sequence
  Probe
aggagagatgtgtgggatgctctttgcggggcagatggattaaatgccaccttatgatta

SEQ ID NO: 2140 - DNA, 60 bp, Artificial Sequence
  Probe
gtgtacactgccagggaggagccactgttattccgactttacacatgagcaaactgagtt

SEQ ID NO: 2141 - DNA, 60 bp, Artificial Sequence
  Probe
agcaaccacagtgatcatcttaacgttggtccaaaaccctctagtggcttctcatctcgc

SEQ ID NO: 2142 - DNA, 60 bp, Artificial Sequence
  Probe
atgatcttcttctgccagctcaactgaaacccaggaggtttcctgaaggtgaaaccaaga

SEQ ID NO: 2143 - DNA, 60 bp, Artificial Sequence
  Probe
taaagtctcatgcctccaggcgtttgtgcatcccattttctctgcagagtagaatctccc

SEQ ID NO: 2144 - DNA, 60 bp, Artificial Sequence
  Probe
ctcagaaaagaaacgctttactgaagaggccaccaaatacttccgggagagagtcagccc

SEQ ID NO: 2145 - DNA, 60 bp, Artificial Sequence
  Probe
gagcttatgattttccatcaccagaatgggacacggtgactcctgaagccaaagacctca

SEQ ID NO: 2146 - DNA, 60 bp, Artificial Sequence
  Probe
ccctgcatacataaaggtgcaaaccaacaagatggtgatgctgtcctgcgaggctaaaat

SEQ ID NO: 2147 - DNA, 60 bp, Artificial Sequence
  Probe
tgtggcagatgtgtgagcgcttggttcattatgctgacatatcttttcatgttggcctgg

SEQ ID NO: 2148 - DNA, 60 bp, Artificial Sequence
  Probe
tgctcatgagtctgtcagagtcatcgtgggagggagaacctttgtaaacctgaagacagt

SEQ ID NO: 2149 - DNA, 60 bp, Artificial Sequence
  Probe
cctccctccatcctccagtgggaaactgttgatggtgttttattgtcatgtgttgcttgc

SEQ ID NO: 2150 - DNA, 60 bp, Artificial Sequence
  Probe
cgttcgtcaagcctgcctttgaggaattctgcttgccaacaaagaagtatgctgatgtga

SEQ ID NO: 2151 - DNA, 60 bp, Artificial Sequence
  Probe
tatcttgttttataggctttgtgccttgggcaaagggcagcttactcctggaagaggact

SEQ ID NO: 2152 - DNA, 60 bp, Artificial Sequence
  Probe
cagtctgacaacattccctctctctcttcattctctgcattggcaccttgacttgctggt

SEQ ID NO: 2153 - DNA, 60 bp, Artificial Sequence
  Probe
tgaacaaaatctggtgccagaaagagcttgtgccagggtgaatccaagcccagaaaataa

SEQ ID NO: 2154 - DNA, 60 bp, Artificial Sequence
  Probe
agttgccatgaccagagcttactgagattatgtggtgaggtcacctgagtcaggaacaga

SEQ ID NO: 2155 - DNA, 60 bp, Artificial Sequence
  Probe
ctgtgggcttttattgccatgagctagaagcatcacaggttgaccaataaccatgcccaa

SEQ ID NO: 2156 - DNA, 60 bp, Artificial Sequence
  Probe
ttcctttgtactggaggagtgagtccctatgctgaccccaatacttgcagaggtgattct

SEQ ID NO: 2157 - DNA, 60 bp, Artificial Sequence
  Probe
gtctgcaggtgtgagatgaagacttttgtgagtcctgaggccatttctcctgaccttgtc

SEQ ID NO: 2158 - DNA, 60 bp, Artificial Sequence
  Probe
tgcctgcgtatggctataaatactaaggggagtgtcaggagatgaggctgggatggtaag

SEQ ID NO: 2159 - DNA, 60 bp, Artificial Sequence
  Probe
tgtcaggaagaggtatccaggccagctgggaaggacatgatgaggaaattggaaaaacat

SEQ ID NO: 2160 - DNA, 60 bp, Artificial Sequence
  Probe
acacattaccatccagtgttcacaacacccctacagggtgaggatcagtacctctgtctt

SEQ ID NO: 2161 - DNA, 60 bp, Artificial Sequence
  Probe
taagtcactcagtctccttcatccagggttgggacagagtcagactggctgatgcattag

SEQ ID NO: 2162 - DNA, 60 bp, Artificial Sequence
  Probe
gttttggtatcagtgtcacaggcctcagagaatgagttgggaagcattcccttgagagct

SEQ ID NO: 2163 - DNA, 60 bp, Artificial Sequence
  Probe
gtcattcatcctgtcaatcaagcgagtgggaatggggtgtgcattctctattacccaggt

SEQ ID NO: 2164 - DNA, 60 bp, Artificial Sequence
  Probe
agcagttgcatccttcatggccatgacttttgctctctccttcctttctgggagatgtat

SEQ ID NO: 2165 - DNA, 60 bp, Artificial Sequence
  Probe
cgcacttaagagtcctgggatctgaatgagaatgaccacagcgacttcatgtaacgtggc

SEQ ID NO: 2166 - DNA, 60 bp, Artificial Sequence
  Probe
tggtgggaagattcatgagtgctaatcactggcgagtctttcctgggttccactttgaaa

SEQ ID NO: 2167 - DNA, 60 bp, Artificial Sequence
  Probe
gacagggactgtggcttatttattcctctctagctctgggtttgggaccaggtcagtaca

SEQ ID NO: 2168 - DNA, 60 bp, Artificial Sequence
  Probe
ttcctttattcactttggcagcaggggatccttttctggcctgaagaccagagtctgaat

SEQ ID NO: 2169 - DNA, 60 bp, Artificial Sequence
  Probe
catctgctttcatgcccctgaatttctttgagacccttcaagtgcattccgaggtggttc

SEQ ID NO: 2170 - DNA, 60 bp, Artificial Sequence
  Probe
tagccacttctgactcaagctgcccttctaggtttagaccactctccccagtgaaagatc

SEQ ID NO: 2171 - DNA, 60 bp, Artificial Sequence
  Probe
caatgggatacaaaagttggcaacacattcttccccttttctctgcctgggtgtgacctc

SEQ ID NO: 2172 - DNA, 60 bp, Artificial Sequence
  Probe
gaacctgtacaggagcacaggaaagagtcaaggaggaaaatgctggctttcacataccct

SEQ ID NO: 2173 - DNA, 60 bp, Artificial Sequence
  Probe
tgctagcatgtatcatgtgtgtggtgtgcatagcacatagcactgtatgctggacctgtt

SEQ ID NO: 2174 - DNA, 60 bp, Artificial Sequence
  Probe
cacctggaaaacaagcgtcctctgcacctctctttatgctggatctctacaatgccatga

SEQ ID NO: 2175 - DNA, 60 bp, Artificial Sequence
  Probe
ctgatagcacttttcagaaagaagtctggaccaggctgaaggcatttgcaaagcttcccc

SEQ ID NO: 2176 - DNA, 60 bp, Artificial Sequence
  Probe
tatgcatatcttgacattgctctgtaggtgagagaggaccatgacgcccatgtttgcagc

SEQ ID NO: 2177 - DNA, 60 bp, Artificial Sequence
  Probe
gccaattaaagccaggccctgattgctttaaggaagggctgatgtatttcatcccacctt

SEQ ID NO: 2178 - DNA, 60 bp, Artificial Sequence
  Probe
ccataagtggagtccctgtgctaggatttttcatcatagctgtgctgatgagcgctcagg

SEQ ID NO: 2179 - DNA, 60 bp, Artificial Sequence
  Probe
atcctacactgaaagctcttgggtctggctgttctctgtgaaatgctgtagtctctccct

SEQ ID NO: 2180 - DNA, 60 bp, Artificial Sequence
  Probe
cccctgttgcgaaggaagatcccttatctcttcatctgtcactaatgatggtggcttgcg

SEQ ID NO: 2181 - DNA, 60 bp, Artificial Sequence
  Probe
tccacaaaaattgctctcccacttggtcctgtcctaaggcctaaatctcctttgggttga

SEQ ID NO: 2182 - DNA, 60 bp, Artificial Sequence
  Probe
gccatgtgagtttggacactggggtcttggtcattatgacatgcctatgctctaggtagc

SEQ ID NO: 2183 - DNA, 60 bp, Artificial Sequence
  Probe
accaagtctaaggcagggaggataagaaacattgtcccattgaacagctgaggaagcagg

SEQ ID NO: 2184 - DNA, 60 bp, Artificial Sequence
  Probe
ttggaaactcaggcagggtttcagtgttgcagtctcgagaatccttcttcaggaaacctc

SEQ ID NO: 2185 - DNA, 60 bp, Artificial Sequence
  Probe
aagcaaaaagccacaggtcattaggaagtgatgctccaactgggcatggaaaaggagttt

SEQ ID NO: 2186 - DNA, 60 bp, Artificial Sequence
  Probe
gtggttgctgttaacactattgcatgactcctgaccataggctctgccactgacacttca

SEQ ID NO: 2187 - DNA, 60 bp, Artificial Sequence
  Probe
ttggcctaagaggctactcacagacatctggctttagtttccacctccgatacagaccaa

SEQ ID NO: 2188 - DNA, 60 bp, Artificial Sequence
  Probe
attgaacctcggaattgcgccaggagatacctcaaggtagactttgcagatattggctgg

SEQ ID NO: 2189 - DNA, 60 bp, Artificial Sequence
  Probe
tggaaggagggcagaaatgaatgaacttatggagcagacctcggagatcatcacgtttgc

SEQ ID NO: 2190 - DNA, 60 bp, Artificial Sequence
  Probe
gacaactgagtcacgcacaactcaacatggagcctaactgattatcagctcagatcccgc

SEQ ID NO: 2191 - DNA, 60 bp, Artificial Sequence
  Probe
cccatttccaatcagtcatgggaccagaagtttacactggaactggacaggtcacgtgaa

SEQ ID NO: 2192 - DNA, 60 bp, Artificial Sequence
  Probe
aggaccatggatgggagacagagaccagtgcaatgcctgcattaaccctttagttgttag

SEQ ID NO: 2193 - DNA, 60 bp, Artificial Sequence
  Probe
tgctctgtctcttaccctggggagttcatgatctgtagaggaaaagtgggcttcctcatc

SEQ ID NO: 2194 - DNA, 60 bp, Artificial Sequence
  Probe
taaacacaattcacctcctcacacactagacaggaaaccaacgcagcttgaagccagtga

SEQ ID NO: 2195 - DNA, 60 bp, Artificial Sequence
  Probe
aaaacttcctagtatggccctacagctctggcccagcccttcttcccattttactttctg

SEQ ID NO: 2196 - DNA, 60 bp, Artificial Sequence
  Probe
aaaagggagttcccaacctgcaaacaaatctccctcaagtcattggcaagctctacatgc

SEQ ID NO: 2197 - DNA, 60 bp, Artificial Sequence
  Probe
aactctcctcatatttaaggtctctgctgaaaagccacctcctccgaaaggctgtcccta

SEQ ID NO: 2198 - DNA, 60 bp, Artificial Sequence
  Probe
atggtttctactcctgagaaccgccagactttcatcacctcagtcatcaaattcctgcgc

SEQ ID NO: 2199 - DNA, 60 bp, Artificial Sequence
  Probe
cctggaacgagaagcgcagggtctacgaagaatagggtgaaaaacctcagaagggaaaac

SEQ ID NO: 2200 - DNA, 60 bp, Artificial Sequence
  Probe
agctgcgttgcacttgtttacgcgttacgctgagagtaaaccccaaaacgattggtaaac

SEQ ID NO: 2201 - DNA, 60 bp, Artificial Sequence
  Probe
cctgctgcatgtcacagacaccggtgtaggaatgaccagagaagagttggttaaaaacct

SEQ ID NO: 2202 - DNA, 60 bp, Artificial Sequence
  Probe
ccctatgacacggatctataccaacgccaaacgcacgagtattacccctatctcagcagt

SEQ ID NO: 2203 - DNA, 60 bp, Artificial Sequence
  Probe
ggggtccctgtccccagctgctcctggggagtagaagcaataatgtatttctaatttgtg

SEQ ID NO: 2204 - DNA, 60 bp, Artificial Sequence
  Probe
agtgtatttagtcgagacctctctgctgagcttgcaacctgtttattcacatggcctgcc

SEQ ID NO: 2205 - DNA, 60 bp, Artificial Sequence
  Probe
ccataaggacagcatgaactgaccacccttagaagcactcctcggtactcccataatcct

SEQ ID NO: 2206 - DNA, 60 bp, Artificial Sequence
  Probe
atcttggtcagctgatagtatccggctacagatctcaaacccagacctcaaagaccgcat

SEQ ID NO: 2207 - DNA, 60 bp, Artificial Sequence
  Probe
acaagtcacagtttctcaagtgagtttgcaggccgaagtccccaggcaaaagtcaaattc

SEQ ID NO: 2208 - DNA, 60 bp, Artificial Sequence
  Probe
atgtggtccccagtcatctctgcttctagaatgtatggagctctcagtcctgctggaaaa

SEQ ID NO: 2209 - DNA, 60 bp, Artificial Sequence
  Probe
cttagaacacatcttccccaagagttcaccctgctggcaacttctcatccattaggcctc

SEQ ID NO: 2210 - DNA, 60 bp, Artificial Sequence
  Probe
tgatggacaacttcaaggtggccagtccaatagtgaactatttcagcaggagccacagac

SEQ ID NO: 2211 - DNA, 60 bp, Artificial Sequence
  Probe
acaagcgcattctgcacaagaccaaggggaaacggttcacctacaagttcaatttcaaca

SEQ ID NO: 2212 - DNA, 60 bp, Artificial Sequence
  Probe
ttagaagagagaggtctgcggcttccacaccgtacagcgtggtttttcttctcggtataa

SEQ ID NO: 2213 - DNA, 60 bp, Artificial Sequence
  Probe
gtttcgttccattttccagcacatacaatcagctcagtctcagcgtagcccctcagaact

SEQ ID NO: 2214 - DNA, 60 bp, Artificial Sequence
  Probe
caaccagaaaagcattggccttctctgcttcctgtcaactcaatgatgggatgtttgggt

SEQ ID NO: 2215 - DNA, 60 bp, Artificial Sequence
  Probe
ttgccaagtacttgctgctccttcccatggaataccttttccctctcagccaaaatccta

SEQ ID NO: 2216 - DNA, 60 bp, Artificial Sequence
  Probe
ttcttgccctggggagaaaaaaaactcaaactatccatgcttagggcaggggagaggtag

SEQ ID NO: 2217 - DNA, 60 bp, Artificial Sequence
  Probe
atgggtttgcactaagagagaagatggaactctggagcacttcagagacttcccagagct

SEQ ID NO: 2218 - DNA, 60 bp, Artificial Sequence
  Probe
aagatcaaaaacttagccgggtatggtggtgcatgtgtgcctgtagtccaagctacttga

SEQ ID NO: 2219 - DNA, 60 bp, Artificial Sequence
  Probe
ttggatcgtggaggaaagggtttgcttttgggaggatataatgagttcctggagcatgct

SEQ ID NO: 2220 - DNA, 60 bp, Artificial Sequence
  Probe
agtctttagggataggccttttggagaactcagtcccaggaaggaacaggaaagaggtgt

SEQ ID NO: 2221 - DNA, 60 bp, Artificial Sequence
  Probe
gtcacacaagaagggaggagagaaaagccatggccggtgagtcttttactgttccaagaa

SEQ ID NO: 2222 - DNA, 60 bp, Artificial Sequence
  Probe
gagaacacagttcatcattcccattcagcctgccttcatgtgttcaaggggctggaaaag

SEQ ID NO: 2223 - DNA, 60 bp, Artificial Sequence
  Probe
ctgctggactgaagtttggaggtggatctgagaaggggagtgacactgagttgctagtat

SEQ ID NO: 2224 - DNA, 60 bp, Artificial Sequence
  Probe
ttggggaaactaaggcccagagacctaaggtgactgcctaagttagcaaggagaagtctt

SEQ ID NO: 2225 - DNA, 60 bp, Artificial Sequence
  Probe
catccctatgctcaacaaagttgggtcaagcaggttaagacggcacataggtcactgtga

SEQ ID NO: 2226 - DNA, 60 bp, Artificial Sequence
  Probe
atcccaattcctgtcagggtactgcaacatggccaatgtggcaaatgtgattctggaaat

SEQ ID NO: 2227 - DNA, 60 bp, Artificial Sequence
  Probe
ctggacgggcaactgcagtccagggaaacctactcaaaaagtatctgtatcatctggcac

SEQ ID NO: 2228 - DNA, 60 bp, Artificial Sequence
  Probe
ctgcaccaggcttgtcatttaccatcttccataaacttgagcccatccatcaagttgccc

SEQ ID NO: 2229 - DNA, 60 bp, Artificial Sequence
  Probe
ataccatggaaggaacaagtgcaaagagcctgtggcaggaaggaatgaggtaaggttagg

SEQ ID NO: 2230 - DNA, 60 bp, Artificial Sequence
  Probe
cttacccaaactcttcacagctgggtttcccacgctcttcttccaaccaactgcaaattc

SEQ ID NO: 2231 - DNA, 60 bp, Artificial Sequence
  Probe
ttcatccaacaaatccactgggccggaaaatttaaagcacctaccctatgccaagcagtg

SEQ ID NO: 2232 - DNA, 60 bp, Artificial Sequence
  Probe
gcttttgaccacacagaccatgatggggaagtactgcatctgatcagcaagagagacagg

SEQ ID NO: 2233 - DNA, 60 bp, Artificial Sequence
  Probe
tgaaaaggcccccaaggtagttatccttaaaaaagccacagcatacatcctgtccgtcca

SEQ ID NO: 2234 - DNA, 60 bp, Artificial Sequence
  Probe
gtcattggtaaagcagctaatgcaaacgtggctatcacaaggcatcggaaaatgggagct

SEQ ID NO: 2235 - DNA, 60 bp, Artificial Sequence
  Probe
ccttcagagagaggtgactgtccaggacctattgagctctgcatctgtctggctgtttag

SEQ ID NO: 2236 - DNA, 60 bp, Artificial Sequence
  Probe
aaacttgacaagaccagctcctgagacatggcacagtgttgacaccatgcttatacctcc

SEQ ID NO: 2237 - DNA, 60 bp, Artificial Sequence
  Probe
cttttttgtatcccaaggtggcctgtggacacccacatggacaaatgtttacactgggac

SEQ ID NO: 2238 - DNA, 60 bp, Artificial Sequence
  Probe
acctgagggctctgaatggtctggggttttaaagtagctacccttgcgtcacaaaatgag

SEQ ID NO: 2239 - DNA, 60 bp, Artificial Sequence
  Probe
caagagatatgggggcttcatgagaggcttaaagagaagcccccaactggaagatgaagc

SEQ ID NO: 2240 - DNA, 60 bp, Artificial Sequence
  Probe
catttgtggagagaacaggagggccagatagataggtcctagcagaaggcattgaggtga

SEQ ID NO: 2241 - DNA, 60 bp, Artificial Sequence
  Probe
atcactgggccatatactcagacactaaaagacatcaggagaggccagctgaggtccaaa

SEQ ID NO: 2242 - DNA, 60 bp, Artificial Sequence
  Probe
atccatctctcctaccagagtgtccaccttaggatggtgctctctgcaggcgaatatttg

SEQ ID NO: 2243 - DNA, 60 bp, Artificial Sequence
  Probe
aagtctgttagatctccaggtcagggcacagcactggctctacatttaccaggtcttacg

SEQ ID NO: 2244 - DNA, 60 bp, Artificial Sequence
  Probe
ctcagcttggttcctgcccccgccctgctgtatgatattaatgtggaaggtcatcaataa

SEQ ID NO: 2245 - DNA, 60 bp, Artificial Sequence
  Probe
tccatcagccatacctaagacctgcacctaagtggccatgtttgctcaaatgtcctcatc

SEQ ID NO: 2246 - DNA, 60 bp, Artificial Sequence
  Probe
cgaaatgctgggcttagtatgcatgtactgctgaaaagcagggcagaacaaatcaggctc

SEQ ID NO: 2247 - DNA, 60 bp, Artificial Sequence
  Probe
ttgcatttctggactgaaccagtcttacctgagactggaaggctgatttgctttgaggct

SEQ ID NO: 2248 - DNA, 60 bp, Artificial Sequence
  Probe
acgaggctctgagggagctgatggatctttacctgaagatgaaaccagtatggcgatcat

SEQ ID NO: 2249 - DNA, 60 bp, Artificial Sequence
  Probe
gagcatggttcagctcagagctgtccttattgaatcgttgccacagctaagaggtcactg

SEQ ID NO: 2250 - DNA, 60 bp, Artificial Sequence
  Probe
cagaaccctctaaccttgggcagctccttacctcttcctgtctgagccatgtttgatttg

SEQ ID NO: 2251 - DNA, 60 bp, Artificial Sequence
  Probe
tcagtcctgctccttctgcaagcccaagaaattcactaccatgatggtcacactcaactg

SEQ ID NO: 2252 - DNA, 60 bp, Artificial Sequence
  Probe
cctgggaacactgaccatatctagtctcccggctttttccccaagatcctggtctctaaa

SEQ ID NO: 2253 - DNA, 60 bp, Artificial Sequence
  Probe
tccttctacctccccttctcatccctcctcttcctcttctctagctgcacacttcactac

SEQ ID NO: 2254 - DNA, 60 bp, Artificial Sequence
  Probe
atgaagatactgtgtggcccaaacgaataccagtttcctttagccccagaggctgacaag

SEQ ID NO: 2255 - DNA, 60 bp, Artificial Sequence
  Probe
ttcttcatggtgcccccaaaagaattgccacacaataacagcccagaatatccccaacag

SEQ ID NO: 2256 - DNA, 60 bp, Artificial Sequence
  Probe
tgatcatgcctgggtggctgtgctcaagactttcactttaaggtctgaaccagtaagtgg

SEQ ID NO: 2257 - DNA, 60 bp, Artificial Sequence
  Probe
gagagaaacagatgaccaggaaccgccttggttcacataactgacaagttcagggaacgg

SEQ ID NO: 2258 - DNA, 60 bp, Artificial Sequence
  Probe
gacccagctttagagtccagggagagctgaccgtcataagaactgagaggccataacatt

SEQ ID NO: 2259 - DNA, 60 bp, Artificial Sequence
  Probe
tgtcagtttatgatctgacctaggtcccccctttcttctgtcccctgtgtttaagtcggg

SEQ ID NO: 2260 - DNA, 60 bp, Artificial Sequence
  Probe
gtggctcaggtgtttctgaacaactacgacgcggagaacaaactgaacgacattctcctc

SEQ ID NO: 2261 - DNA, 60 bp, Artificial Sequence
  Probe
gtacagatgaagtcagtggcttgtctgtgagctgaagagtcttgagaggggctgtcatct

SEQ ID NO: 2262 - DNA, 60 bp, Artificial Sequence
  Probe
agcttctggaattgttgctgttgtgccctttccattcttttgttatgatgcagctcccct

SEQ ID NO: 2263 - DNA, 60 bp, Artificial Sequence
  Probe
gcttgcatagttccttcttttaagcgcctgacttcgttttgtttggtgcccgttgtacct

SEQ ID NO: 2264 - DNA, 60 bp, Artificial Sequence
  Probe
ggtgcaagtggacctgtgtaggacgtccagtgaaacattgtgttggtgaatcagctagaa

SEQ ID NO: 2265 - DNA, 60 bp, Artificial Sequence
  Probe
ctacatcacagaactgtcagatatggtacccacctgtagtgccctggctcgaaaaccaga

SEQ ID NO: 2266 - DNA, 60 bp, Artificial Sequence
  Probe
tcgttgtcatctggtagagtcatgcccatcacgtaacagctgccaatgcatatttctgca

SEQ ID NO: 2267 - DNA, 60 bp, Artificial Sequence
  Probe
tgcttagagaggttaagtgacttgcgtaaggtcacccagagtggcagagctgagatttga

SEQ ID NO: 2268 - DNA, 60 bp, Artificial Sequence
  Probe
gccagcagtggtctttatgctggctagttttgagaatgacagtctggagactgatccagc

SEQ ID NO: 2269 - DNA, 60 bp, Artificial Sequence
  Probe
tgagacctgggttgatgcagatctctattgccagaacatgaattcaggcaacctggtgtc

SEQ ID NO: 2270 - DNA, 60 bp, Artificial Sequence
  Probe
ggtgggaaactagggagttgctggtataaagcctggagtccaaatgtcagagagcctaga

SEQ ID NO: 2271 - DNA, 60 bp, Artificial Sequence
  Probe
attagctggcatagcagaggtgttcataaacattcttagtccccagaaccggctttgggg

SEQ ID NO: 2272 - DNA, 60 bp, Artificial Sequence
  Probe
cactcatgcccacccagggtaagtctaatcatgttcaccaatcagaacctctgccacatc

SEQ ID NO: 2273 - DNA, 60 bp, Artificial Sequence
  Probe
tttgcaatcaggtgagacctcctctgatggggaaaatgacacggtgagtgacaaaggatg

SEQ ID NO: 2274 - DNA, 60 bp, Artificial Sequence
  Probe
aaggagaaacgctactgaccagagagaggtccagtcatgtactccgtgcttggtgaattt

SEQ ID NO: 2275 - DNA, 60 bp, Artificial Sequence
  Probe
gcaatcccactaggacacaacacaatgggttcctgagccctttgatcctctgaatagagc

SEQ ID NO: 2276 - DNA, 60 bp, Artificial Sequence
  Probe
caggagctgaggataaagggcccgatctttctttgggcaaggttaagcctttactgcata

SEQ ID NO: 2277 - DNA, 60 bp, Artificial Sequence
  Probe
aaggcaaaaagacaccataggttacccagcaccctgtgttctcacttttgagaagggaca

SEQ ID NO: 2278 - DNA, 60 bp, Artificial Sequence
  Probe
caggcttcctcctcctcatcagctattttacccatctcagaacgtcctgtgtctccatgt

SEQ ID NO: 2279 - DNA, 60 bp, Artificial Sequence
  Probe
aggttccagttttgtctgaaaattctgattaagcctctgggccctacagcctggagaacc

SEQ ID NO: 2280 - DNA, 60 bp, Artificial Sequence
  Probe
atactttgcattgtctgtctgcacaccttgaatctgcctgctggctcccttactttacct

SEQ ID NO: 2281 - DNA, 60 bp, Artificial Sequence
  Probe
gagcacatagaaaaaattcccagcaagcctttgtcttttcctggcagtcagcccctcttt

SEQ ID NO: 2282 - DNA, 60 bp, Artificial Sequence
  Probe
agcataggcccccataatgggatctgtgcccttataagaagtgaccaggaagcttactct

SEQ ID NO: 2283 - DNA, 60 bp, Artificial Sequence
  Probe
tgaagaaggaggctgactgggaaatgtcaaatctgggctcccctctctacatcctttgta

SEQ ID NO: 2284 - DNA, 60 bp, Artificial Sequence
  Probe
ggcctggagtttagaatcagggctctttccaaagacactgcatctgaagatgtcagaggc

SEQ ID NO: 2285 - DNA, 60 bp, Artificial Sequence
  Probe
gagtccaggactgaggttcggaaatcctgggttttttcaccccattactggatgacttgg

SEQ ID NO: 2286 - DNA, 60 bp, Artificial Sequence
  Probe
ttcccaagaaactgtgcttggccggctgctttcaattatgctggttgtatgtgcatagtt

SEQ ID NO: 2287 - DNA, 60 bp, Artificial Sequence
  Probe
ggcatgagatgccctttgagtgtacagcaaatcaatgttttcctgcttggggctctcttc

SEQ ID NO: 2288 - DNA, 60 bp, Artificial Sequence
  Probe
aggctgctcacttaggaaaccatatgccagacactgagctagaaactgaggagacagacc

SEQ ID NO: 2289 - DNA, 60 bp, Artificial Sequence
  Probe
gagggaaattaaggtgaaatggctcccacagggatcttggcttaaagagctaaccccaca

SEQ ID NO: 2290 - DNA, 60 bp, Artificial Sequence
  Probe
ccctggcaaggaaatgagaaagtatcctaattagggggcaataaccccctggagaagcac

SEQ ID NO: 2291 - DNA, 60 bp, Artificial Sequence
  Probe
gtgtaggatgatctcaggtgacagacagcagcaatttatcacacccagaaacgcatcccc

SEQ ID NO: 2292 - DNA, 60 bp, Artificial Sequence
  Probe
gctgcaaggggtgaggacaccagcatgaaccttgttcaggtaattaacactaactgacct

SEQ ID NO: 2293 - DNA, 60 bp, Artificial Sequence
  Probe
tccttaaggaggaaaaccagatgctgaggaagagcagcttccctgagacagaagagaagg

SEQ ID NO: 2294 - DNA, 60 bp, Artificial Sequence
  Probe
cttctctttaactcaggactccagcccattggtagacgtgtgtttctagagcctgctgga

SEQ ID NO: 2295 - DNA, 60 bp, Artificial Sequence
  Probe
tttttctactagctactgaggctgccacatctggatggaactgagtggagggggaaaaga

SEQ ID NO: 2296 - DNA, 60 bp, Artificial Sequence
  Probe
cttcatctgtcctgaaacggaaatcggacagaaagcctttgcggggaggaggttataacc

SEQ ID NO: 2297 - DNA, 60 bp, Artificial Sequence
  Probe
tctagaagccactcaaattctttggctcgtggttccctcctccatcatcaaaaccagcag

SEQ ID NO: 2298 - DNA, 60 bp, Artificial Sequence
  Probe
gacccagtgaagtttaagggcaggacacctcttaagttggggctcttcactcacttgttg

SEQ ID NO: 2299 - DNA, 60 bp, Artificial Sequence
  Probe
ggtcccagatcccacttcctcatggtactcatacttttcatgcagcctgtcccttttgtg

SEQ ID NO: 2300 - DNA, 60 bp, Artificial Sequence
  Probe
tatcagactgttccctgttcacagcaccctcagggtcttaaggtcttcatgccctatcac

SEQ ID NO: 2301 - DNA, 60 bp, Artificial Sequence
  Probe
gtttcaaggcttagtgtgtgttgtggtgtgcgtcagtagctcttggtgcttagtctggaa

SEQ ID NO: 2302 - DNA, 60 bp, Artificial Sequence
  Probe
atgcagtctaggtaccacaagtagtgttctcttgtgcaagcacagcttccagctgtgttg

SEQ ID NO: 2303 - DNA, 60 bp, Artificial Sequence
  Probe
ctatttgaagacagacacagggattggagtgatgtgtctacaagccaagcaacgccgagg

SEQ ID NO: 2304 - DNA, 60 bp, Artificial Sequence
  Probe
acttgagaggcagacatacagagcaagacacagggcaggccaaaaaagaccacttacatc

SEQ ID NO: 2305 - DNA, 60 bp, Artificial Sequence
  Probe
tatatccaagaaagaaacctgctgctcccctctctgctgagggaagagcaagaggaactt

SEQ ID NO: 2306 - DNA, 60 bp, Artificial Sequence
  Probe
ggccttgggcaagttacctccattttctgtctccattctcgagcctgtctagagagagaa

SEQ ID NO: 2307 - DNA, 60 bp, Artificial Sequence
  Probe
actggggtgaagtttcgtactgggatcatgggtgtcatctacaggaaggctctggttatc

SEQ ID NO: 2308 - DNA, 60 bp, Artificial Sequence
  Probe
tagctacctcccactcagccatattgcagcacagatgatggacatctgggtacccataaa

SEQ ID NO: 2309 - DNA, 60 bp, Artificial Sequence
  Probe
ctgtccagtttgtggcatcctacaaggttgcctacagtaatgacagtgcgaactggactg

SEQ ID NO: 2310 - DNA, 60 bp, Artificial Sequence
  Probe
cactctgcatacgcttctgttgagaatttgtggctagacattcctgtgggaccgggaatc

SEQ ID NO: 2311 - DNA, 60 bp, Artificial Sequence
  Probe
gcattttatattttcctaggctgaggcttcccaggctgttgctttttttccccccacctt

SEQ ID NO: 2312 - DNA, 60 bp, Artificial Sequence
  Probe
ttgccaagagtcacacagcaagttaacagtggatctcccaattccctgccaatgctctat

SEQ ID NO: 2313 - DNA, 60 bp, Artificial Sequence
  Probe
caactataactccagtgatgacttgcatacaaggcgtgggctcagagggtttggggaaaa

SEQ ID NO: 2314 - DNA, 60 bp, Artificial Sequence
  Probe
ctgtttctgttctctcctgcttagctccagggatggaactgggactgggatagaggaaag

SEQ ID NO: 2315 - DNA, 60 bp, Artificial Sequence
  Probe
aggagctgcaaggagaatgttgtggttagattggagtgaggaaggggtagggtactgaaa

SEQ ID NO: 2316 - DNA, 60 bp, Artificial Sequence
  Probe
acagctggtcaagaacgataccatagcctagcaccaatgtactacagaggagcacaagca

SEQ ID NO: 2317 - DNA, 60 bp, Artificial Sequence
  Probe
cctccccaatttttgcaaagtaggaactggagttttctcgttgctccaaagctgtgaggc

SEQ ID NO: 2318 - DNA, 60 bp, Artificial Sequence
  Probe
ctgtacaccatctcgtaatcgcgaaagttatcaccatgttggaaaagcccacgcccttct

SEQ ID NO: 2319 - DNA, 60 bp, Artificial Sequence
  Probe
aagaagctgtgagtgcaggtgttagagacaggcagcatgaagaggagggaatagagtcag

SEQ ID NO: 2320 - DNA, 60 bp, Artificial Sequence
  Probe
ttgaaaaatgtcaacttgggatgtgtcttggaggagggactgacaaggcctgctgatctc

SEQ ID NO: 2321 - DNA, 60 bp, Artificial Sequence
  Probe
aggaccctttctccacaggcaggctcatttcactaagctcctcctttactttctctctcc

SEQ ID NO: 2322 - DNA, 60 bp, Artificial Sequence
  Probe
agaggggctgttagcattgcgcagcatcttcagttctccagtaaatgatattgcgttcgt

SEQ ID NO: 2323 - DNA, 60 bp, Artificial Sequence
  Probe
aagtgacagctgttactgcctgggagagctcaagtgcaaagactatcctgttctcccata

SEQ ID NO: 2324 - DNA, 60 bp, Artificial Sequence
  Probe
atgcgaccgaaagacttgaaaaaacggctgatggtgaaattccgtggggaagaaggtttg

SEQ ID NO: 2325 - DNA, 60 bp, Artificial Sequence
  Probe
ctggagacccggtggagaagaaggacgaaacaccttttggggtgagataggaagtagaag

SEQ ID NO: 2326 - DNA, 60 bp, Artificial Sequence
  Probe
gtgattctcagctgaaatagattggttcctccacaaagcatcgtggcacttccctggtga

SEQ ID NO: 2327 - DNA, 60 bp, Artificial Sequence
  Probe
gagaatggagtctgaggtgagcactttactgggaattgcagtcccagggtagcagtagaa

SEQ ID NO: 2328 - DNA, 60 bp, Artificial Sequence
  Probe
agcattctgacctctgccctgggacttcctggatcctcctcttcttataaatacaagggc

SEQ ID NO: 2329 - DNA, 60 bp, Artificial Sequence
  Probe
catcatcctcaggcctctctacaagcagcaggaaacatagaactcagagccagatccctt

SEQ ID NO: 2330 - DNA, 60 bp, Artificial Sequence
  Probe
gcggcccacatcatggtgaaggagtacatgattcagtttaataggctcgtggctgagttc

SEQ ID NO: 2331 - DNA, 60 bp, Artificial Sequence
  Probe
gacaccatcttccacaaggtgctttcttcgggctgtgattattccgaactcacgtggtac

SEQ ID NO: 2332 - DNA, 60 bp, Artificial Sequence
  Probe
accttagccactccacagccactttcagggatcagtgtggagaaagattcatagtcaggt

SEQ ID NO: 2333 - DNA, 60 bp, Artificial Sequence
  Probe
agaagctcataacagtggtgaacattggagagggcagctgagacctcaaccttgcaaaat

SEQ ID NO: 2334 - DNA, 60 bp, Artificial Sequence
  Probe
cattctctctttctcttgatgacgcagctgtcatttggctgtgcgtgctgacagttttgc

SEQ ID NO: 2335 - DNA, 60 bp, Artificial Sequence
  Probe
tctgcgcaaatggtgattgttccaaccttgaaggctcctacatgtgttcatgccacaaag

SEQ ID NO: 2336 - DNA, 60 bp, Artificial Sequence
  Probe
ccccatacaccagtgttgctggctgaagatacccgcttaaggatgctaacatttaccctg

SEQ ID NO: 2337 - DNA, 60 bp, Artificial Sequence
  Probe
aatccattcctcctgttaggcctctgcctaaaatacttgtacccagcaatttgcctggct

SEQ ID NO: 2338 - DNA, 60 bp, Artificial Sequence
  Probe
ccaagaagctggacagctgtaaatttctgctggacaacccgtacacccacacctattcat

SEQ ID NO: 2339 - DNA, 60 bp, Artificial Sequence
  Probe
tagactaaacaaaatcagcaaatggcccctgagtgccaccaagtcccagatgctatcctg

SEQ ID NO: 2340 - DNA, 60 bp, Artificial Sequence
  Probe
ttacatgccactgttggggctcagaaagtgataccaggacaactggtgctttgacatgat

SEQ ID NO: 2341 - DNA, 60 bp, Artificial Sequence
  Probe
cttagctcagtctcattaggcagaactgagccacatctccccacagatccaacacagaca

SEQ ID NO: 2342 - DNA, 60 bp, Artificial Sequence
  Probe
gtcagcatcctcaccatcaccatgaagggtaagttccacatcccaatccaagggaaagtc

SEQ ID NO: 2343 - DNA, 60 bp, Artificial Sequence
  Probe
atggggaagtactctcttcccttggggtggctgggactatgtgacttttgagtaacagtt

SEQ ID NO: 2344 - DNA, 60 bp, Artificial Sequence
  Probe
ccataccctgctctattccagaaactctccagcctgccaagttaggttttccaaggcaaa

SEQ ID NO: 2345 - DNA, 60 bp, Artificial Sequence
  Probe
gcaagtaagttttgctccacaaatcccccaactcagcagcacatgtcttttgctctaccc

SEQ ID NO: 2346 - DNA, 60 bp, Artificial Sequence
  Probe
catcccatgtgcaagagctctcagttcaaatccgatcagtccaacccatccacagtcaaa

SEQ ID NO: 2347 - DNA, 60 bp, Artificial Sequence
  Probe
tggagtaaatgaactggaccaaatctcaaaaatccacgatgtcatcggcacacccgctca

SEQ ID NO: 2348 - DNA, 60 bp, Artificial Sequence
  Probe
tacgacattggacgaaagctgtggatctacctgcatcgtgaccggagtgaagaagagttt

SEQ ID NO: 2349 - DNA, 60 bp, Artificial Sequence
  Probe
gctggtgtcgccagaactacaagcagctgtcgaagagatactgccaagccttaaaaaaga

SEQ ID NO: 2350 - DNA, 60 bp, Artificial Sequence
  Probe
atgggcaaacgggatgctgattcctcaattgaaaaacaagtggccctgttaaaggctctt

SEQ ID NO: 2351 - DNA, 60 bp, Artificial Sequence
  Probe
gcgtacccttgagacaaggggtctttggaaactatgtccaggacctgggaacatgaaaac

SEQ ID NO: 2352 - DNA, 60 bp, Artificial Sequence
  Probe
tgggttctgatattgccgcactaggggatataggagaggaaaagtaaggtgcagttcccc

SEQ ID NO: 2353 - DNA, 60 bp, Artificial Sequence
  Probe
tgatgaagcagcaagagacccacctgaagcaacagcttgccctatacacagagaagtttg

SEQ ID NO: 2354 - DNA, 60 bp, Artificial Sequence
  Probe
ggaactttcttcaccactttcccctcccttttccatcttccttcagatagacatgcgccc

SEQ ID NO: 2355 - DNA, 60 bp, Artificial Sequence
  Probe
ccataacttggatagttgctgagccagccagatataacaagagccacgtgctttctgggg

SEQ ID NO: 2356 - DNA, 60 bp, Artificial Sequence
  Probe
aaatgttgctctgggagacttactgcattgccgacagcacagatgtgaaggacatgagac

SEQ ID NO: 2357 - DNA, 60 bp, Artificial Sequence
  Probe
atgaggttctcagaggcttggacatcaccctggtgcatgacattgttaacatgctgatcc

SEQ ID NO: 2358 - DNA, 60 bp, Artificial Sequence
  Probe
agttgaagacagtggaacctactactgtacgggcaaagtgtggcagctggactatgagtc

SEQ ID NO: 2359 - DNA, 60 bp, Artificial Sequence
  Probe
caaacacatgacataaggcaggtgtgtgctacctgcccctagagaaactcttgagcaagg

SEQ ID NO: 2360 - DNA, 60 bp, Artificial Sequence
  Probe
catcatactcagatccagggtccacccaaatttctcttctcctcctcaccactggctacc

SEQ ID NO: 2361 - DNA, 60 bp, Artificial Sequence
  Probe
catccaggacctggtttaactagtcctcattctggtcctgtgatggaactctgcctccag

SEQ ID NO: 2362 - DNA, 60 bp, Artificial Sequence
  Probe
aagaagtacctcccagctccagctgcttcatgtctctccagaactctgtttcctgacaaa

SEQ ID NO: 2363 - DNA, 60 bp, Artificial Sequence
  Probe
gtaagcacattctcccctccttcttccttgccagaaagcaacaacaaggaatcctccact

SEQ ID NO: 2364 - DNA, 60 bp, Artificial Sequence
  Probe
ccacaacatggtgcttccctcttcaaagaagaatcctagaactccctctgcagcatgtgg

SEQ ID NO: 2365 - DNA, 60 bp, Artificial Sequence
  Probe
aggaagtccctgaatttcctgaaccaagttgggaccttgtgtcttgctcagcatcacttt

SEQ ID NO: 2366 - DNA, 60 bp, Artificial Sequence
  Probe
gttctggcaagagcagatactgtctttgtgctgaatacgctaagcctggaagccatcctg

SEQ ID NO: 2367 - DNA, 60 bp, Artificial Sequence
  Probe
atagcagacagccccaaagcaagatgtccattggatgcactgaatacgactaagcccaaa

SEQ ID NO: 2368 - DNA, 60 bp, Artificial Sequence
  Probe
ctggagaaagcatcaaaactgcgaggaatctcaacaaagccagtctacatccccgaggtg

SEQ ID NO: 2369 - DNA, 60 bp, Artificial Sequence
  Probe
ttctaagttggacgtctccggcgtgcattttatcctagagcgtcccttttggtttgcatt

SEQ ID NO: 2370 - DNA, 60 bp, Artificial Sequence
  Probe
tcagggcttttgtgctggctcttctgtctgctggaatgtgctctgtcttagtaattgcaa

SEQ ID NO: 2371 - DNA, 60 bp, Artificial Sequence
  Probe
ggcttctggcgatgccatagtggcttaaggatgtcagagctgaggttccaccattttatt

SEQ ID NO: 2372 - DNA, 60 bp, Artificial Sequence
  Probe
agtctaaggagggtgctgcctgacatgttcacttaagccactgctttggctttcttttct

SEQ ID NO: 2373 - DNA, 60 bp, Artificial Sequence
  Probe
ggtgcatgttaatatggacagtgctggtgtagacagaaaggcaggtggatgaacttggct

SEQ ID NO: 2374 - DNA, 60 bp, Artificial Sequence
  Probe
gtgccaacagtgttgatcttcctgcctgtttcttcttgaaatttccccagccaatcccag

SEQ ID NO: 2375 - DNA, 60 bp, Artificial Sequence
  Probe
tctacttggacacaaactcctggggcagtagttctcaattgggctactccactttggagt

SEQ ID NO: 2376 - DNA, 60 bp, Artificial Sequence
  Probe
caggtctttgcaccctgtgtttcctcttcctggaatgctgttcttctagctactgcatgg

SEQ ID NO: 2377 - DNA, 60 bp, Artificial Sequence
  Probe
tacctgaccctctctgggaaggatggaggagagtctaagaagccttgtgcagtaagtgat

SEQ ID NO: 2378 - DNA, 60 bp, Artificial Sequence
  Probe
gctcagtagtgtacagcaaggaaggcactctggctgaaactcactaagtgggagaatcct

SEQ ID NO: 2379 - DNA, 60 bp, Artificial Sequence
  Probe
cagtatcaacttcatagagctggcatgagggtgcgatgagctgatggctgtgaaagaagc

SEQ ID NO: 2380 - DNA, 60 bp, Artificial Sequence
  Probe
tgaatatcaaagcccatatccacatgttgctagaggtgagagcagctcaccccactacca

SEQ ID NO: 2381 - DNA, 60 bp, Artificial Sequence
  Probe
aatttaagtctggacttcccagtctgtcaccccaggatgtcctttatctgaccccagctt

SEQ ID NO: 2382 - DNA, 60 bp, Artificial Sequence
  Probe
aggccattatcttgctcatacaaggtcctttccctttctgcctggtcctaagctgtagga

SEQ ID NO: 2383 - DNA, 60 bp, Artificial Sequence
  Probe
atagacatctctaccaagatctcctgctcctgccactctgtgaacaggaaaggagggaga

SEQ ID NO: 2384 - DNA, 60 bp, Artificial Sequence
  Probe
gccctcgtggtgaaggcaaaagaccttaatccagagaagcacgttcatccctgagaaatt

SEQ ID NO: 2385 - DNA, 60 bp, Artificial Sequence
  Probe
ctagaaaaccttaccccagtggtgctcagaccagagattcgcaaaccagaggttctcaga

SEQ ID NO: 2386 - DNA, 60 bp, Artificial Sequence
  Probe
gtaaggattggccttggccacttcgaaaagggactagctgtggttcagtgaaaggctaat

SEQ ID NO: 2387 - DNA, 60 bp, Artificial Sequence
  Probe
tttccgctgcatcacaggctcctcattctccacattgcagataatcacgtttaggactgc

SEQ ID NO: 2388 - DNA, 60 bp, Artificial Sequence
  Probe
aagacactcgatacatatttaggcctcaggatggtttgtggcgtggtcagcagactgact

SEQ ID NO: 2389 - DNA, 60 bp, Artificial Sequence
  Probe
gacagggcaacatttcatacaccatttagtcacctaggccaaagtccggaaggatgctcc

SEQ ID NO: 2390 - DNA, 60 bp, Artificial Sequence
  Probe
tggagtgaagtgcaagcattgcaggttgaagtgtcacaacaaatgtaccaaagaagcccc

SEQ ID NO: 2391 - DNA, 60 bp, Artificial Sequence
  Probe
ctaacgatgtgacctcgggcactcaactctttgtgcctcacttttcctgcctgtaaagtg

SEQ ID NO: 2392 - DNA, 60 bp, Artificial Sequence
  Probe
tctttgctgactctctttccatgttcctgtgatgttgtgcttgtgtcccgacataagccc

SEQ ID NO: 2393 - DNA, 60 bp, Artificial Sequence
  Probe
accgcaactctctgaacctgtctctttatctgcaaggtgcacgactgatgggactattca

SEQ ID NO: 2394 - DNA, 60 bp, Artificial Sequence
  Probe
gttctcagcacagatattctacacctcacgccttcaccttgaacacctccagtccctcat

SEQ ID NO: 2395 - DNA, 60 bp, Artificial Sequence
  Probe
tctgtcagttagcaccctggttccactggtcatgaaagtgagttgagtcaggaacttcca

SEQ ID NO: 2396 - DNA, 60 bp, Artificial Sequence
  Probe
tgagaccaagtttgccaagcattgcgtgaagtgcaacaaggtatgctttcaagggagttc

SEQ ID NO: 2397 - DNA, 60 bp, Artificial Sequence
  Probe
caggtcacttccagagcacttctgaccatttgaaaaggccctgctttgtgaaatttggca

SEQ ID NO: 2398 - DNA, 60 bp, Artificial Sequence
  Probe
gtagaagctgcttccactcagaacccttgtccttgggcaaatgaagtccaacgagtttca

SEQ ID NO: 2399 - DNA, 60 bp, Artificial Sequence
  Probe
gggccataagatgaggagattctgaggcaggcaagtcagctttcaggaaagttgttcctg

SEQ ID NO: 2400 - DNA, 60 bp, Artificial Sequence
  Probe
aaaaggctgcatgcctgtggttctgttgatacgacattctggaaaaggcacatctaggga

SEQ ID NO: 2401 - DNA, 60 bp, Artificial Sequence
  Probe
agctgtgtggtctccatgcagatctgtcagctgaggttggtgttagtgaatactacaggg

SEQ ID NO: 2402 - DNA, 60 bp, Artificial Sequence
  Probe
gctattgtgtaatggaggccatacttggcggtggagtgcaaacaggactgcaaacaaatg

SEQ ID NO: 2403 - DNA, 60 bp, Artificial Sequence
  Probe
agcaaagggaaagaaatgacttggaggaggctcctggtgtctgaaacggcagtgtatttt

SEQ ID NO: 2404 - DNA, 60 bp, Artificial Sequence
  Probe
ttcatcgcttatgatgtccttgagagaaaccaagtatttgagcccagctgcctggatgcc

SEQ ID NO: 2405 - DNA, 60 bp, Artificial Sequence
  Probe
agactcatctcagtgacctacactcatcactcccctactgaaccctgttgtgtacagcct

SEQ ID NO: 2406 - DNA, 60 bp, Artificial Sequence
  Probe
tattggagatacgaggacctggaaacttgggagttcaagaacagagggcccacaaggatc

SEQ ID NO: 2407 - DNA, 60 bp, Artificial Sequence
  Probe
gctgaagcagcctccagacctgctgtcatgggtatttaaggacctaaatgttgctgtcag

SEQ ID NO: 2408 - DNA, 60 bp, Artificial Sequence
  Probe
tcagtttcaggtactcagcaagatctttacaaggggctccctcatcctggaatgctcctt

SEQ ID NO: 2409 - DNA, 60 bp, Artificial Sequence
  Probe
gctgacttcatctcttcagcagccttccttctggttttacagcccacaccacagattcag

SEQ ID NO: 2410 - DNA, 60 bp, Artificial Sequence
  Probe
cgcaagtcacacacctggttcccatccttgaggaatttgctatctaaaggcccttgagtt

SEQ ID NO: 2411 - DNA, 60 bp, Artificial Sequence
  Probe
cagccaggtactaaaggagctgctgggacaggggattgattatgagaagatcctgaagct

SEQ ID NO: 2412 - DNA, 60 bp, Artificial Sequence
  Probe
gtgcctgatgtgggaacagctcttctcccagatgtaaatagaacaacctgcacaacctgg

SEQ ID NO: 2413 - DNA, 60 bp, Artificial Sequence
  Probe
actgaagcgtggatcccttttgctgtattttctggtctggggaatatggacttgctcagc

SEQ ID NO: 2414 - DNA, 60 bp, Artificial Sequence
  Probe
agggaaaatagctttcctttccctcctggtgaaggaaaaagaggccactttaacccaggg

SEQ ID NO: 2415 - DNA, 60 bp, Artificial Sequence
  Probe
gtatagccccctgccaagtggctatcaactgtgtgggcatcttcagtcatagggatctta

SEQ ID NO: 2416 - DNA, 60 bp, Artificial Sequence
  Probe
gggcgccttgttttgctgcaatatgaacttaaaagccaaagatccagcattgcccctttg

SEQ ID NO: 2417 - DNA, 60 bp, Artificial Sequence
  Probe
agcccacgtgctaacaggaattgaaagaagtgccatctttaactgggtagggctgacaag

SEQ ID NO: 2418 - DNA, 60 bp, Artificial Sequence
  Probe
tatgccacgtatcaggtgacaagaggtctagcaagtctcaacagttgtgtggaccccatt

SEQ ID NO: 2419 - DNA, 60 bp, Artificial Sequence
  Probe
cacccccatgcacacgccatctgtgtaacttcaggatctgttctgtttcaccatgtaaca

SEQ ID NO: 2420 - DNA, 60 bp, Artificial Sequence
  Probe
tcttcagaaaacctagggtccaaggttaagccatatcccagctcagtaaagccaggagca

SEQ ID NO: 2421 - DNA, 60 bp, Artificial Sequence
  Probe
atctttcttggggagaaggctgccaaatggaagacatcagatggacagatggatggcttg

SEQ ID NO: 2422 - DNA, 60 bp, Artificial Sequence
  Probe
ctccctgctatatggatgtcattcctgaagatcaccgattggagagcccaaccactcctc

SEQ ID NO: 2423 - DNA, 60 bp, Artificial Sequence
  Probe
ttttcgtgcctgaacgttgtcacataaaccccaaggcagcacgtccaaaatgctgtaaaa

SEQ ID NO: 2424 - DNA, 60 bp, Artificial Sequence
  Probe
acagcttcacctctttcctttccttccacattgatcaagttgttccgctcctgtggatgg

SEQ ID NO: 2425 - DNA, 60 bp, Artificial Sequence
  Probe
ccaagccaaggaattccaaggactgtaagccaccagtagaagctttgaagaggcaaggaa

SEQ ID NO: 2426 - DNA, 60 bp, Artificial Sequence
  Probe
actggctaagacttcagacaggcttgtgtccagactcttgagaaagctctgttggcttct

SEQ ID NO: 2427 - DNA, 60 bp, Artificial Sequence
  Probe
tgtgctgtcagctgtcattggcagagagaagggtgtggtggtgttatggtataagagaca

SEQ ID NO: 2428 - DNA, 60 bp, Artificial Sequence
  Probe
tcatcctcagcatgttggcctgtcacttttaggctcgtcaatttgtggtcacagtacagc

SEQ ID NO: 2429 - DNA, 60 bp, Artificial Sequence
  Probe
gacccagccttgcatttagctatcatgcctacgtcctgtcttccagtctgtgacagtgta

SEQ ID NO: 2430 - DNA, 60 bp, Artificial Sequence
  Probe
tctcccctcgtcagcgacaccacaaagagttcaagttcaacttatcccagattcctgagg

SEQ ID NO: 2431 - DNA, 60 bp, Artificial Sequence
  Probe
caaaaccacatgggtcgcaggagctaaggggtggtacccaaatgttaggaacagtgttag

SEQ ID NO: 2432 - DNA, 60 bp, Artificial Sequence
  Probe
catgtgaaaacacagagacacagggagcgtgccaagtgaagatggaggattggagtgatg

SEQ ID NO: 2433 - DNA, 60 bp, Artificial Sequence
  Probe
ttggagtcttgtctcccatcccagcacattgaggatgtagttggtgaatggactcttcca

SEQ ID NO: 2434 - DNA, 60 bp, Artificial Sequence
  Probe
tagctgagattggaatccatgccttctggtattcagatccttctcgctgccccattagct

SEQ ID NO: 2435 - DNA, 60 bp, Artificial Sequence
  Probe
atgaacaagcctcacaagccccatctctttctcaatcccacttacgtttgcctggttctc

SEQ ID NO: 2436 - DNA, 60 bp, Artificial Sequence
  Probe
tagggtttgggagacagctcatccaatctcccaagtctcatggtggatttgtgactgtga

SEQ ID NO: 2437 - DNA, 60 bp, Artificial Sequence
  Probe
gttcgtgtgagatctggtggcttaaaagagtctgctccccctttgccttccattgtgatt

SEQ ID NO: 2438 - DNA, 60 bp, Artificial Sequence
  Probe
agccaatgtctgaagtaggcagatgaaagagaaagggtggagatggatcctgctctgagg

SEQ ID NO: 2439 - DNA, 60 bp, Artificial Sequence
  Probe
gtgcccaggcaccaagctcaggctcagttaggaagaaaacttggcaacaggataatagag

SEQ ID NO: 2440 - DNA, 60 bp, Artificial Sequence
  Probe
gctgaaaacgtttcatcacgtccactcctcccagcaacagaggagaacggatttcattgt

SEQ ID NO: 2441 - DNA, 60 bp, Artificial Sequence
  Probe
gttgcttgggtagttcaggactgacaggactggacaccaggtctcctgtttatccttgaa

SEQ ID NO: 2442 - DNA, 60 bp, Artificial Sequence
  Probe
aatgaaatccaggacacgccactgacttgcgcctgtctgccaatttttccccatttaaaa

SEQ ID NO: 2443 - DNA, 60 bp, Artificial Sequence
  Probe
gacaatgatgtgagttcttcgaattgtgctgagaagttccaaggagcctggtggtacgcc

SEQ ID NO: 2444 - DNA, 60 bp, Artificial Sequence
  Probe
gtagactccagaagttccaacactgctgtccatcagcccttcgccaaaatatggatgctg

SEQ ID NO: 2445 - DNA, 60 bp, Artificial Sequence
  Probe
agatttaccagtctggtgggaatgtggccctcatgatagggatttgcttattggtgctgc

SEQ ID NO: 2446 - DNA, 60 bp, Artificial Sequence
  Probe
agaagagcggcagtttcgtgagcgacctcagcagttactgcaacaaggaggtatacaata

SEQ ID NO: 2447 - DNA, 60 bp, Artificial Sequence
  Probe
gcaacctctaccatgccagccaacttagttagccttcctgcttgtctgatcttccaacac

SEQ ID NO: 2448 - DNA, 60 bp, Artificial Sequence
  Probe
gtagcagacagtgggggtggctatgatgactatccctgctttccagacaaggagaatgag

SEQ ID NO: 2449 - DNA, 60 bp, Artificial Sequence
  Probe
atggatggacaaaaagtggcagtttgtgggcaatttgagcagtcctttcatttggcgaga

SEQ ID NO: 2450 - DNA, 60 bp, Artificial Sequence
  Probe
gaagactaattgaaccctgcccctcccctgacctccactcagatagctgatttaagcctc

SEQ ID NO: 2451 - DNA, 60 bp, Artificial Sequence
  Probe
ttaggcaggctcccagtctgcacaacctttttgctgtgtgtcggaatatgtataactggc

SEQ ID NO: 2452 - DNA, 60 bp, Artificial Sequence
  Probe
gactgtgagagtccagtggaaggaggattctttgtctaagcggcagagaggggaaatgac

SEQ ID NO: 2453 - DNA, 60 bp, Artificial Sequence
  Probe
attagtttcctttgaggtttgcttctcgtgggctggtccagaatggagatccattggctg

SEQ ID NO: 2454 - DNA, 60 bp, Artificial Sequence
  Probe
cttcaaacacccattgcagccacacttgcttccttgctattcctcgaacacatcaaaccc

SEQ ID NO: 2455 - DNA, 60 bp, Artificial Sequence
  Probe
tctcttgcgacatgtggattaccatacccttcttctttccctccagctcacttttcccct

SEQ ID NO: 2456 - DNA, 60 bp, Artificial Sequence
  Probe
aactggtgtagtgggtggtaaacccaatgcccacaggggccttattacattgatttcctc

SEQ ID NO: 2457 - DNA, 60 bp, Artificial Sequence
  Probe
gcctatacttctctacctaagagggcaggagggaaaccctacagctccttgtgagcctat

SEQ ID NO: 2458 - DNA, 60 bp, Artificial Sequence
  Probe
aagccacctcaagtggacaaggcacttaccaacagagattgctgatttgctccttaagca

SEQ ID NO: 2459 - DNA, 60 bp, Artificial Sequence
  Probe
tgtgcttattgtgacctcaggacctttgcacacactggtcttccttcctggaatgctttt

SEQ ID NO: 2460 - DNA, 60 bp, Artificial Sequence
  Probe
tgtcttgtggtattcaagccaatctggtgtcagaatcatcgcaatgtagggatggcctgc

SEQ ID NO: 2461 - DNA, 60 bp, Artificial Sequence
  Probe
agaacgagctcatcagggcgagagacaggatgaacatgaaggtgacaggtattgcattca

SEQ ID NO: 2462 - DNA, 60 bp, Artificial Sequence
  Probe
acagaagtggctttggcaaatttgaacgtggtggaaacagtcgctggtgtgacaaatcag

SEQ ID NO: 2463 - DNA, 60 bp, Artificial Sequence
  Probe
gtttagtccttacatcacacagctaacaaaggttggcagccacagagctgctcactgtcc

SEQ ID NO: 2464 - DNA, 60 bp, Artificial Sequence
  Probe
ctatttaactggcttcagcctccccaccttcttcagccacctctctttttcagttggctg

SEQ ID NO: 2465 - DNA, 60 bp, Artificial Sequence
  Probe
cagttggatgggttcagaggcacagaaaaatgctgaggcactgcccgtcaaaaagaaaat

SEQ ID NO: 2466 - DNA, 60 bp, Artificial Sequence
  Probe
gggaaagacttccatctagtcacaaagactccttcgtccccagttgccgtctaggattgg

SEQ ID NO: 2467 - DNA, 60 bp, Artificial Sequence
  Probe
atggagaaggagaacagattagggccttcaagtgtgagcactgccgagtccttttcctag

SEQ ID NO: 2468 - DNA, 60 bp, Artificial Sequence
  Probe
agttcttgctgcggtttctgcccatttttttcatatcctctgacagctgcgaggtcatct

SEQ ID NO: 2469 - DNA, 60 bp, Artificial Sequence
  Probe
cttccctgtcctctgctctgtggtacttcctctctggctgatttagcaaacagcacctag

SEQ ID NO: 2470 - DNA, 60 bp, Artificial Sequence
  Probe
agcactacaggcagaattgacactagagccatcagtttgtgacttctgggctagagtgca

SEQ ID NO: 2471 - DNA, 60 bp, Artificial Sequence
  Probe
ttccctccagagggaacggagccaatgaaactggcatcgtaatgctggattaaaacgttc

SEQ ID NO: 2472 - DNA, 60 bp, Artificial Sequence
  Probe
cagtgaactatttctacacagtgggaactctgacaagggctgacctgcctctcacacaca

SEQ ID NO: 2473 - DNA, 60 bp, Artificial Sequence
  Probe
cctgaactctgacatttcttctttcccaggctttcccttcccccctataggtctggttca

SEQ ID NO: 2474 - DNA, 60 bp, Artificial Sequence
  Probe
cttgggagttgtgtttgaaaacaacctcttgtggccctggacttggtgaaaaaggcaact

SEQ ID NO: 2475 - DNA, 60 bp, Artificial Sequence
  Probe
tggtcttgagcgaagggtaggcgagggctgacttacattttccaaggatcattcttcaga

SEQ ID NO: 2476 - DNA, 60 bp, Artificial Sequence
  Probe
aattttgttatgttgtgcgggctggagtgtagtgcccatccattggcacgatcatagagt

SEQ ID NO: 2477 - DNA, 60 bp, Artificial Sequence
  Probe
taggggcaggtgaaaggaataggaaattgaacctggggttttgacttgccactgccataa

SEQ ID NO: 2478 - DNA, 60 bp, Artificial Sequence
  Probe
cacacactgaccacacattaggctgtgtcaccattgtgtggtgtacctgctggaagaatt

SEQ ID NO: 2479 - DNA, 60 bp, Artificial Sequence
  Probe
tcaagagcatcttccgcattcatacagaaactggcaacatctggacccatctgcttggtg

SEQ ID NO: 2480 - DNA, 60 bp, Artificial Sequence
  Probe
ctgctctaacgtttttccccaaccctgtctccgatttcaatgccatactattcccagccc

SEQ ID NO: 2481 - DNA, 60 bp, Artificial Sequence
  Probe
tgcctgttgtagtagcagctcttcttgctctcaaaggtgtctcggttgggactgtacatt

SEQ ID NO: 2482 - DNA, 60 bp, Artificial Sequence
  Probe
gtctctgaggttgggtgtgccacatcctgtatcctcagtttatctgtttcggtctcaggg

SEQ ID NO: 2483 - DNA, 60 bp, Artificial Sequence
  Probe
atcaccgtgatggtgttccaccattttggaaaagacttccccaagtcggagaagctaagc

SEQ ID NO: 2484 - DNA, 60 bp, Artificial Sequence
  Probe
ccatagcctgtatgaacagtgttccctggagttctccagtgctcagcttgagaccttgat

SEQ ID NO: 2485 - DNA, 60 bp, Artificial Sequence
  Probe
cgttgaccgcacactggatgaatggaagcgtgttacttacaaagaggtgctcagcttcaa

SEQ ID NO: 2486 - DNA, 60 bp, Artificial Sequence
  Probe
ggcacattcctttgggtatgttaacctaggcagtgggaggcaaatgggatggtatgtgag

SEQ ID NO: 2487 - DNA, 60 bp, Artificial Sequence
  Probe
caaacacagttacaccccacatatctctcacacacacacacacacgcacacacacacaca

SEQ ID NO: 2488 - DNA, 60 bp, Artificial Sequence
  Probe
aagccaacagccagaagcagtatctcttgactggtcaggtcctcagtgatggaaaagtct

SEQ ID NO: 2489 - DNA, 60 bp, Artificial Sequence
  Probe
gaaatcagctgctcatcaagataagggctgaggcataaaactgccagagggtctcaaggc

SEQ ID NO: 2490 - DNA, 60 bp, Artificial Sequence
  Probe
agtccacctgcagagattcctcatttaattgacatgggctgtgacctggactgtgggata

SEQ ID NO: 2491 - DNA, 60 bp, Artificial Sequence
  Probe
gctggcccttcatgagctgaaaaatctcacccagtatagctggctgttggatggtaagtg

SEQ ID NO: 2492 - DNA, 60 bp, Artificial Sequence
  Probe
ccagacttcctcctataagtctgacagctccgtgtatgcattgcgtatgggtcttggctc

SEQ ID NO: 2493 - DNA, 60 bp, Artificial Sequence
  Probe
gtgttcagagatactggaaaggtggggaacacagacagaggaactgagaagcatcagcca

SEQ ID NO: 2494 - DNA, 60 bp, Artificial Sequence
  Probe
tgtgagactggaacaagcttggcaattcaagaccggcattatggcagtgagttatgaggg

SEQ ID NO: 2495 - DNA, 60 bp, Artificial Sequence
  Probe
aacctagtcaggaacctatggaaaacaggctccagctaccacactgagcatgtgtgaact

SEQ ID NO: 2496 - DNA, 60 bp, Artificial Sequence
  Probe
cgtcaagacaagccttgtgcaaatgggactcagtatctttgggccactggactcattcat

SEQ ID NO: 2497 - DNA, 60 bp, Artificial Sequence
  Probe
ggagaaatggcctagattctcccctctgtctcctggtgatatctccctcctattggctga

SEQ ID NO: 2498 - DNA, 60 bp, Artificial Sequence
  Probe
tacaccgacctgttaggctgtggcacagtcaacatgggagttgtagacaagctacttgag

SEQ ID NO: 2499 - DNA, 60 bp, Artificial Sequence
  Probe
ccatcccgcaccctgtgctttctctactcagttactcactacaccctgctggactaaaag

SEQ ID NO: 2500 - DNA, 60 bp, Artificial Sequence
  Probe
tcacaataacctcccaaccaccagtgtcatcatgtgctttgtggatgaagtgtggtccac

SEQ ID NO: 2501 - DNA, 60 bp, Artificial Sequence
  Probe
aaggagtgtgaggaaaaatttgacctacagctgccggagcaaccaagactgcatcatcaa

SEQ ID NO: 2502 - DNA, 60 bp, Artificial Sequence
  Probe
taatgtcagccctctcagccatgcaagacaaaacacagcacctggagaacagcttaagtg

SEQ ID NO: 2503 - DNA, 60 bp, Artificial Sequence
  Probe
gaaaaatgtggggaatcttctgccagtaggattgctgtcagctgctgggtcagttctcag

SEQ ID NO: 2504 - DNA, 60 bp, Artificial Sequence
  Probe
gatgtcaaggctgttccaccccctccacaggttcttaccttctacctctttcctgcttta

SEQ ID NO: 2505 - DNA, 60 bp, Artificial Sequence
  Probe
tcttctcagcactgtgctgaggaagtctttaaaccttccagtaggacatgggatccctgc

SEQ ID NO: 2506 - DNA, 60 bp, Artificial Sequence
  Probe
gctgtaggaaaaatgctatctgagtcactgccgtcctcaaggcagaaagcaatggcagaa

SEQ ID NO: 2507 - DNA, 60 bp, Artificial Sequence
  Probe
ttcacattgcttcttcttggtggaagctcttcctctggccttgaaaatgcctgcttctct

SEQ ID NO: 2508 - DNA, 60 bp, Artificial Sequence
  Probe
caatttgtaaagcaggggtgtcactccaaaagaagtgggccactgttctcaccactagct

SEQ ID NO: 2509 - DNA, 60 bp, Artificial Sequence
  Probe
gttgaccattttaacaaaccggcagaattcctgagcctcgtgttgtgaattggggcacag

SEQ ID NO: 2510 - DNA, 60 bp, Artificial Sequence
  Probe
taaaccatgggggatgcaacccctttgcgtttcatatgtaggcctactggctttgtgtag

SEQ ID NO: 2511 - DNA, 60 bp, Artificial Sequence
  Probe
aacaccatgccaacagaggtgtttacccccctattcaagttcatgtcacgctgggtaatg

SEQ ID NO: 2512 - DNA, 60 bp, Artificial Sequence
  Probe
cactcatccctactcgccatcattctttcattcctcttggcccaatctctctccaccact

SEQ ID NO: 2513 - DNA, 60 bp, Artificial Sequence
  Probe
tccgccgtttgctgtttgggagtgcgatacaaaatgaatatgtacgcaggtggaacgtag

SEQ ID NO: 2514 - DNA, 60 bp, Artificial Sequence
  Probe
atacgtaactgcagccaactattttggagaaatcatggagtggtgtggctatgccctggc

SEQ ID NO: 2515 - DNA, 60 bp, Artificial Sequence
  Probe
gtccaagctcagtcagcagaagagataaaagcaaacaggtctgggaggcagttctgttgc

SEQ ID NO: 2516 - DNA, 60 bp, Artificial Sequence
  Probe
tttgcccaagttagggtgcatccttcccatgaactttgactgtgacctttgactatgggg

SEQ ID NO: 2517 - DNA, 60 bp, Artificial Sequence
  Probe
ccaacttgcaaatgtgaaattcagacacagagaggagcaccagggcaaggtcatacacct

SEQ ID NO: 2518 - DNA, 60 bp, Artificial Sequence
  Probe
ctacgaggctcacgtcccgagctggggtaatcaagatgattaccaactggttcgaaaact

SEQ ID NO: 2519 - DNA, 60 bp, Artificial Sequence
  Probe
ttgtgggtcacactctttacatttctgtaaggcaatcttggcacacgtggggcttaccag

SEQ ID NO: 2520 - DNA, 60 bp, Artificial Sequence
  Probe
tattatctggcagttcatcaaggagaagctcatcctgccccacgtggacatccagctaaa

SEQ ID NO: 2521 - DNA, 60 bp, Artificial Sequence
  Probe
ctttcctttgattggccatgtcacgggttttctgctggcactttttacccaccagtcttg

SEQ ID NO: 2522 - DNA, 60 bp, Artificial Sequence
  Probe
tggccgggtgaccatgttaaggccattaaagtcatgcttggagaaaccacatagatgctt

SEQ ID NO: 2523 - DNA, 60 bp, Artificial Sequence
  Probe
ctgcttaaagtcagaaacaggttgaaggaggtggaggcgtgggaaagagtctaggaaggt

SEQ ID NO: 2524 - DNA, 60 bp, Artificial Sequence
  Probe
cttccctctaagaaccccacacacaaggacactttaggccaccatgcaaggttttcagac

SEQ ID NO: 2525 - DNA, 60 bp, Artificial Sequence
  Probe
gaagtgtcagtcttggtcatctatgacaccacaccggcaccagaagaccccagaaaacta

SEQ ID NO: 2526 - DNA, 60 bp, Artificial Sequence
  Probe
tgccacatgtgcaactcaggcattcttggaaaccatccctgcggtagcatatctttactt

SEQ ID NO: 2527 - DNA, 60 bp, Artificial Sequence
  Probe
catggcacacagctgtctcggtagctgcattcccagcatgtcctggtctaaatatctaga

SEQ ID NO: 2528 - DNA, 60 bp, Artificial Sequence
  Probe
gctcctttggtgctgaactgcacttggcaatagcccagaatgatgactgttttgcagttt

SEQ ID NO: 2529 - DNA, 60 bp, Artificial Sequence
  Probe
tctaaaggtgaagggacgtctacacccccaacaaaaccaattaggaaccttcggtggtct

SEQ ID NO: 2530 - DNA, 60 bp, Artificial Sequence
  Probe
atgggctgtctggactatcatcctctgtggatgattacccagtggacaccattgcaaaga

SEQ ID NO: 2531 - DNA, 60 bp, Artificial Sequence
  Probe
cttcccatttctggacatcccactatcccctcatcgtcaaaatcaaagccttgccccttt

SEQ ID NO: 2532 - DNA, 60 bp, Artificial Sequence
  Probe
tattcagcaggcagtaccttcaccaacctcaagtactgtaatcacccaggcaccatcctc

SEQ ID NO: 2533 - DNA, 60 bp, Artificial Sequence
  Probe
tctggagatctccaggggcatcacggtgacaaagataatgatcagcacatcatcactgca

SEQ ID NO: 2534 - DNA, 60 bp, Artificial Sequence
  Probe
catgcagctttccctcgtggactttagacccattgggaaaatgttctgagaacccagacc

SEQ ID NO: 2535 - DNA, 60 bp, Artificial Sequence
  Probe
gtagaaccttctgccgctccaagcaccttctgagaaataatggatccccaaaagccactg

SEQ ID NO: 2536 - DNA, 60 bp, Artificial Sequence
  Probe
atgacccacgtgtttcccatttgtgcttgttatttagaaagccaaacttggccctgctgg

SEQ ID NO: 2537 - DNA, 60 bp, Artificial Sequence
  Probe
cacacctgccttgatgtgtgacgacgtgatgatgtgtatgcagacacctgtgttgatgtg

SEQ ID NO: 2538 - DNA, 60 bp, Artificial Sequence
  Probe
cggtcatcagactgtgcctcaggattgtgttgtgctagacacttctggtccaagatctgt

SEQ ID NO: 2539 - DNA, 60 bp, Artificial Sequence
  Probe
tcaccacttccctaatgggccacaggaagtaagttgatcttgatggggagatcacgtcac

SEQ ID NO: 2540 - DNA, 60 bp, Artificial Sequence
  Probe
gggagatgctcgaagacctcagaatatacacacccttaaggttcaagggctggggttgag

SEQ ID NO: 2541 - DNA, 60 bp, Artificial Sequence
  Probe
atttttttgacaggcccatgttctggaaacccccttggtcctgggcaaatacaaatggtt

SEQ ID NO: 2542 - DNA, 60 bp, Artificial Sequence
  Probe
tttttttcaaaggcattggggttaacaggatggggtggtgtttgagagggggaggacata

SEQ ID NO: 2543 - DNA, 60 bp, Artificial Sequence
  Probe
caaagtcgaggagtggttatggtgtggcacagaagaagggtcagaggacggtctttgtta

SEQ ID NO: 2544 - DNA, 60 bp, Artificial Sequence
  Probe
gggacttacagggagatcagggagagaagcagagagaaggagaaagcccagagagcataa

SEQ ID NO: 2545 - DNA, 60 bp, Artificial Sequence
  Probe
cattcctcttcaggaattgcctcagcctaagtttttcccctttccagggcagcctgtatc

SEQ ID NO: 2546 - DNA, 60 bp, Artificial Sequence
  Probe
gaaagagcctgatctggaaggggagttcttccaccagatgtacctcttcttgggctcaag

SEQ ID NO: 2547 - DNA, 60 bp, Artificial Sequence
  Probe
gcacaatgcttaaggcagtgttccagtgctggtgtaggctgaccaacttgttttggtttt

SEQ ID NO: 2548 - DNA, 60 bp, Artificial Sequence
  Probe
ctcttggtccagtcctttctctccacattgctggattactgctgtagcctcagctcatgt

SEQ ID NO: 2549 - DNA, 60 bp, Artificial Sequence
  Probe
ccagaagataccctggctgttaaactagccctgctgggcaaatgaaaaggcacctacatt

SEQ ID NO: 2550 - DNA, 60 bp, Artificial Sequence
  Probe
ctgccatcctcccaaggggcccaaattctttcagtggctacctacatacaattccaaaca

SEQ ID NO: 2551 - DNA, 60 bp, Artificial Sequence
  Probe
tagcagccggtcacccatctatgaatttactgctgcgcaaaacatttgacctttacgcga

SEQ ID NO: 2552 - DNA, 60 bp, Artificial Sequence
  Probe
ttgatgacaccatgcgtgaaactgctgagcctttcttgtttgtggatgagttcctcacgt

SEQ ID NO: 2553 - DNA, 60 bp, Artificial Sequence
  Probe
ctctgagtcatatcattctcctgctcgaaagctcctggtgactccctgtctccctgaaga

SEQ ID NO: 2554 - DNA, 60 bp, Artificial Sequence
  Probe
ctctctcagtccctctgcatcaagacacttacccatttcccacctcatgcctgctaactt

SEQ ID NO: 2555 - DNA, 60 bp, Artificial Sequence
  Probe
ccaaagcccacacacttaaccaccctgcctatttctgtccaaatgtcacctgtcctgaat

SEQ ID NO: 2556 - DNA, 60 bp, Artificial Sequence
  Probe
tcactgttggttcgtgtcttcaggtaggtccaggaagtgggctcagaagcacagatttac

SEQ ID NO: 2557 - DNA, 60 bp, Artificial Sequence
  Probe
gcactgtgatcttgggcaagtcacttaatcccctgaggctcagtctcttacctcatctgg

SEQ ID NO: 2558 - DNA, 60 bp, Artificial Sequence
  Probe
gtagacgtcttacacacattcaccagagggtcccctggtcgaagcattggaatccagaaa

SEQ ID NO: 2559 - DNA, 60 bp, Artificial Sequence
  Probe
taacttgactgctgggcatttttggactgtttgggagggctcagctttcttgtctgtctt

SEQ ID NO: 2560 - DNA, 60 bp, Artificial Sequence
  Probe
acagtaaacctgggccactccagggttactgtgaaggtgacatgagctgatgtgtatcag

SEQ ID NO: 2561 - DNA, 60 bp, Artificial Sequence
  Probe
tcagatggacactgagatggcctctttaatcaaccaacttcccaggccaatctcttccct

SEQ ID NO: 2562 - DNA, 60 bp, Artificial Sequence
  Probe
gctggcaccagaggatgaatatgatgtcctcatagaaggtgaactggagagcgatgaggc

SEQ ID NO: 2563 - DNA, 60 bp, Artificial Sequence
  Probe
cgcatgaatgtaagagtaggaaggggtgggtgtcagggatcacttgggatctttgacact

SEQ ID NO: 2564 - DNA, 60 bp, Artificial Sequence
  Probe
tttgagaagcagggatctgctaagctagaaaaagccgagatcctgcagatgaccgtggat

SEQ ID NO: 2565 - DNA, 60 bp, Artificial Sequence
  Probe
gctatgccttgtttttgtcaccaaaatcctggatggatgcagatctggcttgccagaagc

SEQ ID NO: 2566 - DNA, 60 bp, Artificial Sequence
  Probe
gccatccttaagaggactgaagcaggttatagaggaatcgcagctgtgcactcccactac

SEQ ID NO: 2567 - DNA, 60 bp, Artificial Sequence
  Probe
ctgcatgaagcaccaagcaagccctacctattcacaaagcaggaaagagggaaggaagag

SEQ ID NO: 2568 - DNA, 60 bp, Artificial Sequence
  Probe
ccaatactgtcgagtgccattctgccttttgaagacaagtgcaccttctttcccttccca

SEQ ID NO: 2569 - DNA, 60 bp, Artificial Sequence
  Probe
cagatgcgatcgtgtgtgtgtggggactgcgtatatgtttttgtcagtgtgtgtgaccac

SEQ ID NO: 2570 - DNA, 60 bp, Artificial Sequence
  Probe
gacaactaaggccctgtaggttgattccagaatacactatccaggtccagggtgcagtgg

SEQ ID NO: 2571 - DNA, 60 bp, Artificial Sequence
  Probe
ttggacatttgttccttcccattgggagcccaggagttgagagatcatgtcagctgtcta

SEQ ID NO: 2572 - DNA, 60 bp, Artificial Sequence
  Probe
aagtggatggttccatttgccatggttataagggagacggggagctcaaaactgaagcac

SEQ ID NO: 2573 - DNA, 60 bp, Artificial Sequence
  Probe
taccctgtctcccacctgcaggaatgtctaacaaagcatccatcttcctccttctttgct

SEQ ID NO: 2574 - DNA, 60 bp, Artificial Sequence
  Probe
ctcctgattgcagagctccatctactcctggagctaggtgatttaggagccagaccctta

SEQ ID NO: 2575 - DNA, 60 bp, Artificial Sequence
  Probe
ttaggcccagcgagagagaacagtttctcaaggtaggaatggtgaaaagaaggggtggac

SEQ ID NO: 2576 - DNA, 60 bp, Artificial Sequence
  Probe
acaggtaagatgacactgtcatgatcatcattcgtcctgtgccctgtggacatcaaccca

SEQ ID NO: 2577 - DNA, 60 bp, Artificial Sequence
  Probe
gtcctcatctagaaccaaaggagaggggctccaaaagaatcaccagtgaggattgggtgt

SEQ ID NO: 2578 - DNA, 60 bp, Artificial Sequence
  Probe
caaaagcccttcctcatctgagctggtctagtctgaccttttcccatcaccctccatctc

SEQ ID NO: 2579 - DNA, 60 bp, Artificial Sequence
  Probe
gacgttcacagctgaatctcagtgaacagaatagcagtccctggatggcagtctgcctaa

SEQ ID NO: 2580 - DNA, 60 bp, Artificial Sequence
  Probe
gagattgaaaaagtcgagctcttgccaggagaagtgccaaagccacatagcagaggtgtg

SEQ ID NO: 2581 - DNA, 60 bp, Artificial Sequence
  Probe
ccaagccattctttgactgctgacaggccttccttcataacaaggtgttccacagtccat

SEQ ID NO: 2582 - DNA, 60 bp, Artificial Sequence
  Probe
atgagttgtgacaaatcaacacaaaccccaagtcctccttgccaggccttcaaccactat

SEQ ID NO: 2583 - DNA, 60 bp, Artificial Sequence
  Probe
aagcttctccgaggaaccgtgattgatgtgactgactttgtcaactgggcctcttccata

SEQ ID NO: 2584 - DNA, 60 bp, Artificial Sequence
  Probe
atccaggccagtccccgagatcctgaaaacttcccatttgttgtgttgggaaacaagatt

SEQ ID NO: 2585 - DNA, 60 bp, Artificial Sequence
  Probe
tacgattgtctctgaaacatcgtggcctcaggtgccagggtttgatggacagtagcatta

SEQ ID NO: 2586 - DNA, 60 bp, Artificial Sequence
  Probe
tggggcaaacactcatattcctgagggatacaggtccccaaatttatggctcctggatct

SEQ ID NO: 2587 - DNA, 60 bp, Artificial Sequence
  Probe
tacatggtctaacccctgcatacctctccaatctggactcacctcttctgggaccttctc

SEQ ID NO: 2588 - DNA, 60 bp, Artificial Sequence
  Probe
tccatcatcacatcaccctttttcttttctgtccctcccgccctacccttataaggaccc

SEQ ID NO: 2589 - DNA, 60 bp, Artificial Sequence
  Probe
cctgagggagagtgaggttaagttctgaacccacaggcattatatctgcctggggttcac

SEQ ID NO: 2590 - DNA, 60 bp, Artificial Sequence
  Probe
atcttgttacccgggtccggtcatgagcatagcaacccaacagtttttccaacattaccc

SEQ ID NO: 2591 - DNA, 60 bp, Artificial Sequence
  Probe
catccaactgatgcacatttgtcaagaacccactgaggctagaaaccccccaaacactca

SEQ ID NO: 2592 - DNA, 60 bp, Artificial Sequence
  Probe
gaagccaagtgcatcttccaaaccttctttggttggagatggagaaggtgccatcctctc

SEQ ID NO: 2593 - DNA, 60 bp, Artificial Sequence
  Probe
atggcaaattctctcccaccttcctcacctccagatcccaccactttcctgaattgtact

SEQ ID NO: 2594 - DNA, 60 bp, Artificial Sequence
  Probe
cttgtgtctgggccatttctctcactgtgtaggaaagagtggttcctgtcttctccctgg

SEQ ID NO: 2595 - DNA, 60 bp, Artificial Sequence
  Probe
gtgcaagtctggaagtgtgatgtgaacctagcccttcttgcacaaactctcctttgcctt

SEQ ID NO: 2596 - DNA, 60 bp, Artificial Sequence
  Probe
gcctaatgctgtgatatatgctgacttgcacagtgaccccaagatcttcctgttggcagc

SEQ ID NO: 2597 - DNA, 60 bp, Artificial Sequence
  Probe
gctgtgatgtatgctgctgctctgaacacatctgctgctatgaacacatctgctgctctg

SEQ ID NO: 2598 - DNA, 60 bp, Artificial Sequence
  Probe
acgcaaaccctggtggtcccatttatttcctaaagggtctgtctcacctccacatcctta

SEQ ID NO: 2599 - DNA, 60 bp, Artificial Sequence
  Probe
tcagttaaaatcaagtggggcatgggggatggaggtatggggaggtagttccagaatcag

SEQ ID NO: 2600 - DNA, 60 bp, Artificial Sequence
  Probe
gggccactgagcactattcaccctcaccttttacttcacatcagcccacatcctagagag

SEQ ID NO: 2601 - DNA, 60 bp, Artificial Sequence
  Probe
cttccatgtcagtgctgagaggaaaacttcagcttgtgggcactgctgctatgctgttag

SEQ ID NO: 2602 - DNA, 60 bp, Artificial Sequence
  Probe
gatgccctgtgacccctagagagtgacagggttacctttggacattccagatgttgctac

SEQ ID NO: 2603 - DNA, 60 bp, Artificial Sequence
  Probe
tccaaaacagtaggaattcagctccttccttctcgtcctttgttgtggggtgtaggggag

SEQ ID NO: 2604 - DNA, 60 bp, Artificial Sequence
  Probe
atttggggtaacctcagagtagatgtggtgttggggtcaggtgtggaatgaatgtggtct

SEQ ID NO: 2605 - DNA, 60 bp, Artificial Sequence
  Probe
ttcataaccggaagacttaaccggtggcctcatcaccagagcatcgccaggatttctaat

SEQ ID NO: 2606 - DNA, 60 bp, Artificial Sequence
  Probe
ctcatcctcccaggttactccattgccgctaaaatcactggtccaacaacagtgaatggc

SEQ ID NO: 2607 - DNA, 60 bp, Artificial Sequence
  Probe
gaggttgtgcaatccaccagtcttataaatacagtgacgctccagcctctggaagcctct

SEQ ID NO: 2608 - DNA, 60 bp, Artificial Sequence
  Probe
aagaaggaagggatccagactcggaaccggaagatgtccaacaagtccaagaagagcaag

SEQ ID NO: 2609 - DNA, 60 bp, Artificial Sequence
  Probe
gattgttgccctgtgactgcctcacatggcgtgagacagttttacttagtggttccatgg

SEQ ID NO: 2610 - DNA, 60 bp, Artificial Sequence
  Probe
tctcctatggtttcctctcatccctcggcacctcttgttttcctttttcctgggttcctt

SEQ ID NO: 2611 - DNA, 60 bp, Artificial Sequence
  Probe
tgtatgttctctgttgggaacccctctgttcacagcctcttaaaagaagcagctgggcta

SEQ ID NO: 2612 - DNA, 60 bp, Artificial Sequence
  Probe
tggtgtctggcatagggggtgtgatcaatacctagcattctggcaagggtcagtagaaac

SEQ ID NO: 2613 - DNA, 60 bp, Artificial Sequence
  Probe
tcaggtgcagcaacctgactgatgtttttacaaatcaccttttggtggcctcctgtcact

SEQ ID NO: 2614 - DNA, 60 bp, Artificial Sequence
  Probe
gattccctggccaaggagatccagtacctgaaagatttgatagaagaggtccgcaaggca

SEQ ID NO: 2615 - DNA, 60 bp, Artificial Sequence
  Probe
ggggtggaaggaaagggggggtgatagagaactcttttgtccccacagttatgctaatga

SEQ ID NO: 2616 - DNA, 60 bp, Artificial Sequence
  Probe
gagctaccttttccttccagttcagccccaagggaagggaaagtagtgcctctttcctat

SEQ ID NO: 2617 - DNA, 60 bp, Artificial Sequence
  Probe
aagtgccctgaggcctgactcaactcttcacttgtcacccagatgtgttaacaccatgta

SEQ ID NO: 2618 - DNA, 60 bp, Artificial Sequence
  Probe
ctgttgcttcctttccacttttcttcttccctcttcctccccacagcacagagaattgcc

SEQ ID NO: 2619 - DNA, 60 bp, Artificial Sequence
  Probe
tactgctacggaggagcagcagagaaagggagagggtttgagagggagcaaaagaaaatg

SEQ ID NO: 2620 - DNA, 60 bp, Artificial Sequence
  Probe
gcccagtggtttcaagaggcaaagaatctgaatgagcagctgagagcagcttataccagc

SEQ ID NO: 2621 - DNA, 60 bp, Artificial Sequence
  Probe
tgaccttgttcctcctgaggctgttcctgaacagaaagatccggatcctgagtttccaac

SEQ ID NO: 2622 - DNA, 60 bp, Artificial Sequence
  Probe
gtaatcagcacagtgttcaccaccccagccaacgtttcaactccagagacaaccttgaag

SEQ ID NO: 2623 - DNA, 60 bp, Artificial Sequence
  Probe
acacactgacaaatcaaaacagcacacctgggcatgtatggtctggttctccaaggacac

SEQ ID NO: 2624 - DNA, 60 bp, Artificial Sequence
  Probe
gtggggcacccactgaacgcatgcttgtcttgaatcctcgcagcttagaagttataaagg

SEQ ID NO: 2625 - DNA, 60 bp, Artificial Sequence
  Probe
caggcatggaaggcagtagacagaataaaaccaggaccaggaatttacggcatggcagtg

SEQ ID NO: 2626 - DNA, 60 bp, Artificial Sequence
  Probe
tgtcttacactgggaactcggtttgggtcttcagggtctctctgccaaagtgaaaaggag

SEQ ID NO: 2627 - DNA, 60 bp, Artificial Sequence
  Probe
tcaatgcttcagcccctataaactcagggctggctgaaccaggtcctctccaaaagatta

SEQ ID NO: 2628 - DNA, 60 bp, Artificial Sequence
  Probe
tccctctccttccccactacgttcctctgccatttaacatcggcatgtctgaaatgtctg

SEQ ID NO: 2629 - DNA, 60 bp, Artificial Sequence
  Probe
ttggggaagggtcacttctaagctcatacaatattggtgacattcagtccctggcaggct

SEQ ID NO: 2630 - DNA, 60 bp, Artificial Sequence
  Probe
ccgagaaggaatctcaggaagtttgtttacactgggggcctggagaccttcgggaaaata

SEQ ID NO: 2631 - DNA, 60 bp, Artificial Sequence
  Probe
cagtccttctcatctcacccaggatcacctgggagtgaccaaagtaggccaaatgtgatt

SEQ ID NO: 2632 - DNA, 60 bp, Artificial Sequence
  Probe
cccatcatggtgccatttaggaagcatctgagtgctcaccatttagccacatcgagcatt

SEQ ID NO: 2633 - DNA, 60 bp, Artificial Sequence
  Probe
aagactctgaaacgagaaggtgtttgtgcagccagtcttcctaccactatgggtgtggtt

SEQ ID NO: 2634 - DNA, 60 bp, Artificial Sequence
  Probe
attgaccagtatttaagggaccctaacctccaaaagaggtacccattggcgctcaaccga

SEQ ID NO: 2635 - DNA, 60 bp, Artificial Sequence
  Probe
gttttgggagtcagctagtatggagtacgagatgcaacccagcccccaaacctacattct

SEQ ID NO: 2636 - DNA, 60 bp, Artificial Sequence
  Probe
cttctgctgtctccactttgatctgccctggtatctcaggatgctaggtcaatgcacaca

SEQ ID NO: 2637 - DNA, 60 bp, Artificial Sequence
  Probe
caggcgtggactctttctatctcgagatcttcgatgagagagccttctccatggacgacc

SEQ ID NO: 2638 - DNA, 60 bp, Artificial Sequence
  Probe
cagccgctagcatcctagaagtaattccctcctccttggaaaacgcccactacaatcctt

SEQ ID NO: 2639 - DNA, 60 bp, Artificial Sequence
  Probe
ctgggccttagactccagagtactgcatgggaatgtttcccaaggtaggtttcatggtga

SEQ ID NO: 2640 - DNA, 60 bp, Artificial Sequence
  Probe
tcaatgttgccgcaggattacaagccctgctgaaagagatgcatgatgcaacctctgtag

SEQ ID NO: 2641 - DNA, 60 bp, Artificial Sequence
  Probe
tcttaaagacacggttgtggtcagcggcttcagtcctagctctgcctcccataaaattca

SEQ ID NO: 2642 - DNA, 60 bp, Artificial Sequence
  Probe
acccgtgattctgaatcagcaggtcttaggcaacaggaatctgcattttgatgtggctgg

SEQ ID NO: 2643 - DNA, 60 bp, Artificial Sequence
  Probe
ttccaagaacatgtcccaagcagacaagccccagtgatgtacaagtagctcttccagtca

SEQ ID NO: 2644 - DNA, 60 bp, Artificial Sequence
  Probe
ctctccactagggcttctctgatactacccaggccagcaggaggatgtggagttaagaaa

SEQ ID NO: 2645 - DNA, 60 bp, Artificial Sequence
  Probe
tccaaggggatattcggttgctggctgacgacatgaagactttgaagcccacattgtttc

SEQ ID NO: 2646 - DNA, 60 bp, Artificial Sequence
  Probe
aacaaatccaggactacagaccccacagttctctcgctgccacttcaagtcacgaaatga

SEQ ID NO: 2647 - DNA, 60 bp, Artificial Sequence
  Probe
ccaccagatgttggggctaggattgtgtctaagcagagcctcagcatctgttcttaacct

SEQ ID NO: 2648 - DNA, 60 bp, Artificial Sequence
  Probe
cgcctcctccagcccctgcacctgtcatttattcttccactgcccaataaatattcatgg

SEQ ID NO: 2649 - DNA, 60 bp, Artificial Sequence
  Probe
ttgcgtcccgctgagatgtcactagcagaaaaagggaacacaagcaaaaggcaagattct

SEQ ID NO: 2650 - DNA, 60 bp, Artificial Sequence
  Probe
ttcaccctggagcccatccagtctcccaacttgtattaaagacagaggcagaagtttggt

SEQ ID NO: 2651 - DNA, 60 bp, Artificial Sequence
  Probe
tggaagacagcaatcatggtggccaagccttgactgagctttttcttctccaggctaaag

SEQ ID NO: 2652 - DNA, 60 bp, Artificial Sequence
  Probe
cattctagacaccctccccaaccccacatccccaaaatccaagccacttctaagtagtga

SEQ ID NO: 2653 - DNA, 60 bp, Artificial Sequence
  Probe
gtcctcacactgggtgagcagcttatggtgattccagacatgatctctgttgggagtgac

SEQ ID NO: 2654 - DNA, 60 bp, Artificial Sequence
  Probe
agaagagcattcctgttaggtcattcaccaagtcccagaagggggactgggcatgatatg

SEQ ID NO: 2655 - DNA, 60 bp, Artificial Sequence
  Probe
accatgcctagcaagaggcattaattttgtcatgtttgcatcagccacccttgcatgcaa

SEQ ID NO: 2656 - DNA, 60 bp, Artificial Sequence
  Probe
agagatcaacgacgagaccctccacagtatccggtggttccagttcacctggatagaatc

SEQ ID NO: 2657 - DNA, 60 bp, Artificial Sequence
  Probe
gttctaagcagaagccctgttgcctttctgacctagctttggaagttgtgcagcatcctt

SEQ ID NO: 2658 - DNA, 60 bp, Artificial Sequence
  Probe
ccagggagaataaagcctattctttccttgtcctgacctcactccctcaggctgcatgtt

SEQ ID NO: 2659 - DNA, 60 bp, Artificial Sequence
  Probe
gagtggattggtggggagcaagactggaaacaagaggaccacttcagaggctcttatagc

SEQ ID NO: 2660 - DNA, 60 bp, Artificial Sequence
  Probe
gaatccagaagcagagcttccgctgacagctggcgagtacatctacatctatggcaacat

SEQ ID NO: 2661 - DNA, 60 bp, Artificial Sequence
  Probe
ctacagtggtacctgggggacaatttgcgatgacgagtggcaaaattctgatgccattgt

SEQ ID NO: 2662 - DNA, 60 bp, Artificial Sequence
  Probe
ggagcaagccgctggatatctggagggaaaacatttcaagcagaagtaacaaccagtgca

SEQ ID NO: 2663 - DNA, 60 bp, Artificial Sequence
  Probe
tggtgttacaacaactggacctccaatggggtgattagtcctttaccttggcgtcactca

SEQ ID NO: 2664 - DNA, 60 bp, Artificial Sequence
  Probe
gatggttttctggtgtccctttaggtcccagccagtactgagagtcaaggcaatcatgga

SEQ ID NO: 2665 - DNA, 60 bp, Artificial Sequence
  Probe
gttccttggagcaattctcagagctaggctgcttaaggcatatgagggctcaggactcag

SEQ ID NO: 2666 - DNA, 60 bp, Artificial Sequence
  Probe
acttagcacactaggaggtggaatcctatgcccagagtgatgagatggggctagctagtg

SEQ ID NO: 2667 - DNA, 60 bp, Artificial Sequence
  Probe
ctgcattgggattttggccaaggaggtggagattgtggctagcagtgactctagcatttc

SEQ ID NO: 2668 - DNA, 60 bp, Artificial Sequence
  Probe
acctgcgattgctttgatgggtatcacttggatacggccaagatgacctgtgtcgatgta

SEQ ID NO: 2669 - DNA, 60 bp, Artificial Sequence
  Probe
gggcgtgacgcctaaagccgacatttattcctttgccatcactctctggcaaatgactac

SEQ ID NO: 2670 - DNA, 60 bp, Artificial Sequence
  Probe
catgacacaaccgaatacaaactccgtaccttacaggtctccccgctggacaatggagac

SEQ ID NO: 2671 - DNA, 60 bp, Artificial Sequence
  Probe
tagaggaatgaggtctcccactgtcaccaaacagaactaggtccatttgcccatgtgcaa

SEQ ID NO: 2672 - DNA, 60 bp, Artificial Sequence
  Probe
gagtgattgagatttgcgttgttgtggagagaaaggcgcctgttgcacaatggagtgaga

SEQ ID NO: 2673 - DNA, 60 bp, Artificial Sequence
  Probe
gcagaggaaatgtcaacccacctgcaatcctgcattcaggaccaactgtcacttccatac

SEQ ID NO: 2674 - DNA, 60 bp, Artificial Sequence
  Probe
ttcgactccgggtgtgtgagtttgtatactttttacgtgtgtctggctggctgtgtgtca

SEQ ID NO: 2675 - DNA, 60 bp, Artificial Sequence
  Probe
cagagattaccaagcatggttccatagcctagaggagtccagtgtggcctgtgtgtgttt

SEQ ID NO: 2676 - DNA, 60 bp, Artificial Sequence
  Probe
gtagtccccccatgtgcctactcactgatggctactgtcttctctctgtccctttcatct

SEQ ID NO: 2677 - DNA, 60 bp, Artificial Sequence
  Probe
gggtgggtattctgttgtgggcaagctttaacatttagttccgagtgcgcaacatggaga

SEQ ID NO: 2678 - DNA, 60 bp, Artificial Sequence
  Probe
ggcacctcttgtcgggtcatcacgatctgtacccatatcttcacccaaggactgtttgtc

SEQ ID NO: 2679 - DNA, 60 bp, Artificial Sequence
  Probe
gtggctgccaagaacctgcaggaggcagaagaatggtacaaatccaaggtaggaaacaaa

SEQ ID NO: 2680 - DNA, 60 bp, Artificial Sequence
  Probe
gagtacctgcgctatgaagacacgcttcttctggaagaccagccaacaggtgagaatgag

SEQ ID NO: 2681 - DNA, 60 bp, Artificial Sequence
  Probe
atgtgtcttattagccagcaatgtggctcaggctcgtcctcatttaggttcaggtgtcca

SEQ ID NO: 2682 - DNA, 60 bp, Artificial Sequence
  Probe
aaatgccaaaagtgcccagattgagaaaccccttaacatagttatgcctggctacccccg

SEQ ID NO: 2683 - DNA, 60 bp, Artificial Sequence
  Probe
gtacaggaaactctagccactcgtcctgggacaaccaatgtcaatgcacaagctctggta

SEQ ID NO: 2684 - DNA, 60 bp, Artificial Sequence
  Probe
ggaagggcttttgggaattttctggggccctaaatgttgagtgagaagaaagggagtccg

SEQ ID NO: 2685 - DNA, 60 bp, Artificial Sequence
  Probe
caggagcatggcctagcactgtgcaaacactcaactgctggtcgttgcaaggattattat

SEQ ID NO: 2686 - DNA, 60 bp, Artificial Sequence
  Probe
ggacttctgaacagacagtcataaggaaggcaggaggcagtgagaacaccaggctctttc

SEQ ID NO: 2687 - DNA, 60 bp, Artificial Sequence
  Probe
cccaacctaaactgaatgtgtttttaatggcaatgagggagggggaagcgtgcagagtga

SEQ ID NO: 2688 - DNA, 60 bp, Artificial Sequence
  Probe
tgatgccctgctttggttttgtctatgccaaaagttcctgctatacccacagtggtggtc

SEQ ID NO: 2689 - DNA, 60 bp, Artificial Sequence
  Probe
ctgtttcgtcctgtggctgcagatggacagttgcacacactaggagatctcctcaaagaa

SEQ ID NO: 2690 - DNA, 60 bp, Artificial Sequence
  Probe
cttgggctttgccgcccttatgatgaagtgtgtgtttgatgccagtgagaaactcagtct

SEQ ID NO: 2691 - DNA, 60 bp, Artificial Sequence
  Probe
tgcgagaagactttgtgctgacagcagctcattgctggggaagcaatataaatgtcaccc

SEQ ID NO: 2692 - DNA, 60 bp, Artificial Sequence
  Probe
gacaccaaaagcttcatcttggtgagaaaagcagacatggctgatatcccaggccacgtc

SEQ ID NO: 2693 - DNA, 60 bp, Artificial Sequence
  Probe
accacaaaatccaggagcaaattctgccagaggaagaggagtagaccttaccgaacccac

SEQ ID NO: 2694 - DNA, 60 bp, Artificial Sequence
  Probe
gctgcgccccaagtcaaagtaatagagccacagtttcaccatcaggccattttctgatga

SEQ ID NO: 2695 - DNA, 60 bp, Artificial Sequence
  Probe
aagcctgggaggtagatctcaaaagttctttctacccacactgcttctccatcacgccac

SEQ ID NO: 2696 - DNA, 60 bp, Artificial Sequence
  Probe
gcaagaggaaggtatcatcagaattgcccttaaccaggaaccagaatagctgggtcccct

SEQ ID NO: 2697 - DNA, 60 bp, Artificial Sequence
  Probe
tctatgatccaccacattccgtttcccctgaagggtgatcaaggacacatgcagagatgg

SEQ ID NO: 2698 - DNA, 60 bp, Artificial Sequence
  Probe
cctggattaacgagttacctcgtccgagtggtgagcaccaactacaaccagcatgctatg

SEQ ID NO: 2699 - DNA, 60 bp, Artificial Sequence
  Probe
gatgcctacgacatggctaagctcctgtgtgacaagtattacatggcctcacctgacctg

SEQ ID NO: 2700 - DNA, 60 bp, Artificial Sequence
  Probe
ccaactcagatcctacaacacgcaagttccttcttgaaccctggtgcctcctaccctatg

SEQ ID NO: 2701 - DNA, 60 bp, Artificial Sequence
  Probe
ttccacaggtaggggtgtcttccagtcctgggtgaagaaaacatttatgcatagcaccct

SEQ ID NO: 2702 - DNA, 60 bp, Artificial Sequence
  Probe
gagaaattgcaggtgcccgtcttgattagagtggggcttgtttcagggaaaagtcggatg

SEQ ID NO: 2703 - DNA, 60 bp, Artificial Sequence
  Probe
cctccagttcaaggactttggggcctctgtctgagatgcttagaaacagctcagactgtg

SEQ ID NO: 2704 - DNA, 60 bp, Artificial Sequence
  Probe
atgaggcctgaagagagagcctcagacaagaaggaggaaatcaaagaataacgccaggcc

SEQ ID NO: 2705 - DNA, 60 bp, Artificial Sequence
  Probe
ttgatggaggtgaaaacgggggcctctgaaggaaacaaagaggcagtgaatttgctttct

SEQ ID NO: 2706 - DNA, 60 bp, Artificial Sequence
  Probe
cctgaacagacttctgggaaggaacacccatatctctttagtcagtgccaggccatccac

SEQ ID NO: 2707 - DNA, 60 bp, Artificial Sequence
  Probe
gaggggtttaaggctccgcgggtcattctcatttacagctgttgctcagtgccattattg

SEQ ID NO: 2708 - DNA, 60 bp, Artificial Sequence
  Probe
ttggcttaatgcctgccacgtggtaaggtcttgacatacacctgtctattccctgggaat

SEQ ID NO: 2709 - DNA, 60 bp, Artificial Sequence
  Probe
tccaaaatgggaactagtggcctgtgttctttttctggtgtgattctttggctccacccg

SEQ ID NO: 2710 - DNA, 60 bp, Artificial Sequence
  Probe
cagatgcacctgacttgctgctattaaaaagccgtgtgccttctaccaattgtggcctct

SEQ ID NO: 2711 - DNA, 60 bp, Artificial Sequence
  Probe
tgaccggcgtgagtgatagatgaagttagagctatgttgggatggggtaggattcagggt

SEQ ID NO: 2712 - DNA, 60 bp, Artificial Sequence
  Probe
gcccattgtcgaagccatagttgtggaagcagtcaaaggttggatttattcagggtgggt

SEQ ID NO: 2713 - DNA, 60 bp, Artificial Sequence
  Probe
gaggcctagtgggagaagactgattcacttgttctgggtttgagccctgtaaactgctgt

SEQ ID NO: 2714 - DNA, 60 bp, Artificial Sequence
  Probe
atgagaacctgcacactaagaacaagagggaggagaaagtgaagaagcagcggtcagcag

SEQ ID NO: 2715 - DNA, 60 bp, Artificial Sequence
  Probe
aggtctttcggacccatgagaccccgtgtcattgctttacctccctgagtctcaattttt

SEQ ID NO: 2716 - DNA, 60 bp, Artificial Sequence
  Probe
tgtcctcaccacttaagtgggtgtcaaatttccttccctttctgcacacgctgcacaatc

SEQ ID NO: 2717 - DNA, 60 bp, Artificial Sequence
  Probe
ctttaggacaggaagccatgcattagaccgcaggaagaacccactgaagtcaggctctac

SEQ ID NO: 2718 - DNA, 60 bp, Artificial Sequence
  Probe
attgtatggaaggaccacagtttatccacctgttcatccgctgttggggacgtatccagg

SEQ ID NO: 2719 - DNA, 60 bp, Artificial Sequence
  Probe
tggggttgcttttagatgttccagtgactggggacactcagtcattggatggcttaagga

SEQ ID NO: 2720 - DNA, 60 bp, Artificial Sequence
  Probe
gtttcaagcagaggaaacaccctggagcaaagacaccaaggcagtagcaaacctggtaaa

SEQ ID NO: 2721 - DNA, 60 bp, Artificial Sequence
  Probe
gagctaccacaccccagagggtggtatggtatgttgtctgttgtgagctgtgtgaatcag

SEQ ID NO: 2722 - DNA, 60 bp, Artificial Sequence
  Probe
ctgagaccatcctgattgggatttggtcagtgggaactcaagtcagtattgtcctggggg

SEQ ID NO: 2723 - DNA, 60 bp, Artificial Sequence
  Probe
ccacggcttcactgggtataattctgtgcttagcggacgctgttccttctactggatcac

SEQ ID NO: 2724 - DNA, 60 bp, Artificial Sequence
  Probe
tccacagtgctctgtaatcaattccaggaccgtgtggatggagaccggaaaggtttcttt

SEQ ID NO: 2725 - DNA, 60 bp, Artificial Sequence
  Probe
gtgtgctcatcaagctcttttgtgtgcatactaaggcactgcaagatgtgcagatccgct

SEQ ID NO: 2726 - DNA, 60 bp, Artificial Sequence
  Probe
ccacaccatcatgaactgcacaaggacctgtcctaagggtctgaatccagggaaagctat

SEQ ID NO: 2727 - DNA, 60 bp, Artificial Sequence
  Probe
attttttgctcctgcgagtcttttgctcccaggtaaactgattgtgaccagggtgtccac

SEQ ID NO: 2728 - DNA, 60 bp, Artificial Sequence
  Probe
ggatatgtgtttagaggtgaggatgtggcccggatggagaatactgagagcagggagact

SEQ ID NO: 2729 - DNA, 60 bp, Artificial Sequence
  Probe
gcagtggcaatgtcccagatttccctggaagttcaaaccaggtgttccactgaactttct

SEQ ID NO: 2730 - DNA, 60 bp, Artificial Sequence
  Probe
agacccatcaccactctcggttccttcccagcaaagtgtcatgtaaatcaggggctattt

SEQ ID NO: 2731 - DNA, 60 bp, Artificial Sequence
  Probe
tgtgaactgagaacctcacttctctgacctcaccttccatctcccttaatcagacgccca

SEQ ID NO: 2732 - DNA, 60 bp, Artificial Sequence
  Probe
tgcctcatcttctggccagggattgatcctgagatgggaagagtatgagaagagacacca

SEQ ID NO: 2733 - DNA, 60 bp, Artificial Sequence
  Probe
cagcgagaaccatggggtggtgatccagcctgcctataaggacaagataaacattaccca

SEQ ID NO: 2734 - DNA, 60 bp, Artificial Sequence
  Probe
agctcggaaaatccccaaagtaggacatacttttttccaaaagcctgagagttgcccgcc

SEQ ID NO: 2735 - DNA, 60 bp, Artificial Sequence
  Probe
ctccgggaactgattgatcagtatgatgtccagagggatgacagcagcgatggctctttg

SEQ ID NO: 2736 - DNA, 60 bp, Artificial Sequence
  Probe
tagcatcagggtctatgatcgggacatccaccatcgaagtgattgcacaagagccctttg

SEQ ID NO: 2737 - DNA, 60 bp, Artificial Sequence
  Probe
tgactatggccaggatgaagaggcagtgaagaagctgacagtaaatcctggcaccaagtc

SEQ ID NO: 2738 - DNA, 60 bp, Artificial Sequence
  Probe
ctgatgaccaggttctgtctctatggaagtcactgcggtgataggtctgtgatggtccct

SEQ ID NO: 2739 - DNA, 60 bp, Artificial Sequence
  Probe
agtctccatggcaaccagtcatcaaggctccagcaaccttttcatagacactctccactc

SEQ ID NO: 2740 - DNA, 60 bp, Artificial Sequence
  Probe
gttcttttgatattggacaatgcccccagccacccagagccccatgagttcaacactaaa

SEQ ID NO: 2741 - DNA, 60 bp, Artificial Sequence
  Probe
agcaggttggtggcagaattgggatttgaacctattctgcttggcttcaaagatcaggct

SEQ ID NO: 2742 - DNA, 60 bp, Artificial Sequence
  Probe
cgcacgtccaaggaaaagccaggtaccaaactgaaacactggatgtagtctgcatcttgc

SEQ ID NO: 2743 - DNA, 60 bp, Artificial Sequence
  Probe
ctgctgctgcaatttctacctgctctaggggttttggacagctgttttctctggcagttc

SEQ ID NO: 2744 - DNA, 60 bp, Artificial Sequence
  Probe
tgtgggattttgtgttggtgaggactggagtgtagctggacttagagggtttggttgtgt

SEQ ID NO: 2745 - DNA, 60 bp, Artificial Sequence
  Probe
aacagacagacactgggttagaaacttttcggtgcttgcacgggtggatttcactttgca

SEQ ID NO: 2746 - DNA, 60 bp, Artificial Sequence
  Probe
catcccgctcttttcctacttttccttccctcaaagcttccattccacatccggaggaga

SEQ ID NO: 2747 - DNA, 60 bp, Artificial Sequence
  Probe
ccataaccaatgtcagcaactcagctttggttccaggtcactagtctggtggagtagggg

SEQ ID NO: 2748 - DNA, 60 bp, Artificial Sequence
  Probe
gtctcatgcctttttgtcctgtcctcagctctccgtgtggtcagcgaaaccattgttttc

SEQ ID NO: 2749 - DNA, 60 bp, Artificial Sequence
  Probe
agtttacctgggctcaatggtttgaaacccagcacatcaatatgacctcccagcaatgca

SEQ ID NO: 2750 - DNA, 60 bp, Artificial Sequence
  Probe
agtgagatcactgatggcaagtttggacaatttccccatttttcccaagctgaccaggct

SEQ ID NO: 2751 - DNA, 60 bp, Artificial Sequence
  Probe
agtctctctcttataaagccctcctttttcatcctagcattgggagcaatggccccaggg

SEQ ID NO: 2752 - DNA, 60 bp, Artificial Sequence
  Probe
gcacaagaaatgtcagccagaaagggctatctgctcccttcgccaaattatcccacaaca

SEQ ID NO: 2753 - DNA, 60 bp, Artificial Sequence
  Probe
cttctcaagatccgagtctacccagcccttgttagattcagaggagcggccagaagatct

SEQ ID NO: 2754 - DNA, 60 bp, Artificial Sequence
  Probe
cagctgggtgcatagtgagggctggagcaatgttttgggaaggatgactgactgaaaaaa

SEQ ID NO: 2755 - DNA, 60 bp, Artificial Sequence
  Probe
gaacaccttggaaccagggatcccatagtggaatctcagtggggcttatattcctgctgg

SEQ ID NO: 2756 - DNA, 60 bp, Artificial Sequence
  Probe
acttgtatcaggaccacatgcagtacatcggagaaggcgcgaagacaggcatcaaagaat

SEQ ID NO: 2757 - DNA, 60 bp, Artificial Sequence
  Probe
gacataggagcgcaaagaagctacagcctggacttaccaccactaaactgcgagagaagc

SEQ ID NO: 2758 - DNA, 60 bp, Artificial Sequence
  Probe
aggtcttttccaagcaggcactcagaacacaggtcaccgtatgttctcagccagtaacaa

SEQ ID NO: 2759 - DNA, 60 bp, Artificial Sequence
  Probe
aggccctattatttccgtgggcgtaacagaggcttttatccatggggccaatataaccga

SEQ ID NO: 2760 - DNA, 60 bp, Artificial Sequence
  Probe
tttgttgggacagggttaactgtaaggtcaggactctgagacaagcgctgactcctccta

SEQ ID NO: 2761 - DNA, 60 bp, Artificial Sequence
  Probe
acgtgagctctctggcctcagtttctcgatttgtgaaatgcagtgaacctcgtcctcaaa

SEQ ID NO: 2762 - DNA, 60 bp, Artificial Sequence
  Probe
gggacggagggttgatgtcatagcaagattgcagccttcactagattaatgaggccaggt

SEQ ID NO: 2763 - DNA, 60 bp, Artificial Sequence
  Probe
ttttgcagttgaggaggctgagtagcctcagaagggtttaggcgaccttctgaaactcac

SEQ ID NO: 2764 - DNA, 60 bp, Artificial Sequence
  Probe
tttacattgttcaggagtacatggagacagacttggctaatgtgctggagcagggccctt

SEQ ID NO: 2765 - DNA, 60 bp, Artificial Sequence
  Probe
ctagggggcaggtggggaggggaagccatggaaatacaagtcaaaggggtaaaaaaaaaa

SEQ ID NO: 2766 - DNA, 60 bp, Artificial Sequence
  Probe
atagaatcctgtgaagcagctccagctatgtgtgaagaagaggacagcactgccttggtg

SEQ ID NO: 2767 - DNA, 60 bp, Artificial Sequence
  Probe
tcagctgagctaaggggctcccaccaggtttgagcctatctaatgaatccatgaggtaga

SEQ ID NO: 2768 - DNA, 60 bp, Artificial Sequence
  Probe
gtgagacccagaagactgtggccaaagctattatggacccatggtctccgtggaatcatc

SEQ ID NO: 2769 - DNA, 60 bp, Artificial Sequence
  Probe
ttgatggaggactttgaggtgagcttcatggagacaatggtggcattcaagctgggtcta

SEQ ID NO: 2770 - DNA, 60 bp, Artificial Sequence
  Probe
ccttaggccgtccagtcatctttctctggggcttgattgatcagttcccactctgacaac

SEQ ID NO: 2771 - DNA, 60 bp, Artificial Sequence
  Probe
agattccaccaccaaacctctgtgaccacaacctcctctatgttcactacagccacttgc

SEQ ID NO: 2772 - DNA, 60 bp, Artificial Sequence
  Probe
acccccgagcagatctttaccaggcctgtacatggatccccaactgttttgagtattgac

SEQ ID NO: 2773 - DNA, 60 bp, Artificial Sequence
  Probe
cctagttctgcctgcaatggcaccagctcaaccacctggtacataagacacaaaagcaag

SEQ ID NO: 2774 - DNA, 60 bp, Artificial Sequence
  Probe
ctcaaagagcgcatgcgtacagagcaaggtttcaaggaggggaaaaagaacgggtcaaat

SEQ ID NO: 2775 - DNA, 60 bp, Artificial Sequence
  Probe
cctgcacatgaggatcccccagatcaactggaatctgacagatttggtcaacactggact

SEQ ID NO: 2776 - DNA, 60 bp, Artificial Sequence
  Probe
gaaatggactctctgctcttagaacctcaggttctcaggcaagagccacctgctattgcc

SEQ ID NO: 2777 - DNA, 60 bp, Artificial Sequence
  Probe
agggatggggtggagaatgggtcatgtcatgtaatgagaaaagccctcttcgggatcatg

SEQ ID NO: 2778 - DNA, 60 bp, Artificial Sequence
  Probe
cctaagctgagagttcggttttcagagatctgggggagtagcatcaatggaggggtttgc

SEQ ID NO: 2779 - DNA, 60 bp, Artificial Sequence
  Probe
ggcatctcctactacctgagctgttttaggcagggaacaaagcacagataagccctcctg

SEQ ID NO: 2780 - DNA, 60 bp, Artificial Sequence
  Probe
tcaggtagctccgagtggggagatgaccaagtcatgccacctaaaacatgtcaccaaaaa

SEQ ID NO: 2781 - DNA, 60 bp, Artificial Sequence
  Probe
caggacacttgctgccacctcttacctggtctccctccttccactctgttctacaatcta

SEQ ID NO: 2782 - DNA, 60 bp, Artificial Sequence
  Probe
ctcactgtgctgaagcccaaagggaaacatccctcatccaagccaaaccagaagcaatat

SEQ ID NO: 2783 - DNA, 60 bp, Artificial Sequence
  Probe
tcctttgcagtctctccatgtctgcatcactggggactgattctgaggtttcagtggttg

SEQ ID NO: 2784 - DNA, 60 bp, Artificial Sequence
  Probe
ctacacgggaaagctgaatatcagcgcggacaaggagaacagcattaaactgacctcggt

SEQ ID NO: 2785 - DNA, 60 bp, Artificial Sequence
  Probe
agatgaagaagacagtgaacatggtctggttcctcaacctggcagtggcagatttcctgt

SEQ ID NO: 2786 - DNA, 60 bp, Artificial Sequence
  Probe
ttcctcaacttcatcaggttcctggagagccactggtttgtgtgggtcacacagatgaat

SEQ ID NO: 2787 - DNA, 60 bp, Artificial Sequence
  Probe
ctcaaccaatggctgctttgttgtctgacaagggagaaggtggcacttccgttcagattc

SEQ ID NO: 2788 - DNA, 60 bp, Artificial Sequence
  Probe
ttctatgctccatacacaggttagcccatcatccctgcaccaccagagagcttttccttg

SEQ ID NO: 2789 - DNA, 60 bp, Artificial Sequence
  Probe
caggaatgcatatgggaagcacctggcaaagtgccggtacctgctaaactctcacaaaaa

SEQ ID NO: 2790 - DNA, 60 bp, Artificial Sequence
  Probe
cactgtcaactgcagcccagcaggaaggaaacgagcaggtataaagaccttaacctcact

SEQ ID NO: 2791 - DNA, 60 bp, Artificial Sequence
  Probe
tgcctaagtccagccaaggtttaaggagaaaggaattaggccccaccttttgaggaagga

SEQ ID NO: 2792 - DNA, 60 bp, Artificial Sequence
  Probe
ccaacttcttgccctacctctctctttcttccccatcacccaatttcccagtcagtcagg

SEQ ID NO: 2793 - DNA, 60 bp, Artificial Sequence
  Probe
tgcaggtcaacgtgatgtccgaaaacatcctcacaggtgccaaaaagctgaccaataagg

SEQ ID NO: 2794 - DNA, 60 bp, Artificial Sequence
  Probe
tctacagcgtacccaaaaaactgttagagctgtcggacctcgcagtggcaatgagaagtg

SEQ ID NO: 2795 - DNA, 60 bp, Artificial Sequence
  Probe
gtactttccagcccagaaggggatttcaggagagcagtccactgaaggttctttcccttt

SEQ ID NO: 2796 - DNA, 60 bp, Artificial Sequence
  Probe
gaaaacatccttctgaacccggcctatgacgtctacctgatggtgggaacctccattcac

SEQ ID NO: 2797 - DNA, 60 bp, Artificial Sequence
  Probe
agagacggtcacttcacactctttgctcccaccaatgaggcttttgagaaacttccacga

SEQ ID NO: 2798 - DNA, 60 bp, Artificial Sequence
  Probe
ttgtgtttcttgggcagtctttcttgaaattgaagaggtgaaatgggggtggggagtggg

SEQ ID NO: 2799 - DNA, 60 bp, Artificial Sequence
  Probe
taaaaaggagctgcctctcagccctgcatgtctcttgtcagctgtctttcagaagacctg

SEQ ID NO: 2800 - DNA, 60 bp, Artificial Sequence
  Probe
tgttggttgtgtgtctcctcctggcaactggattttgcctgttcagaggtttgattgctt

SEQ ID NO: 2801 - DNA, 60 bp, Artificial Sequence
  Probe
aaagagtgaatatgtgtcgcatccagagagctgatggggattgtgacttggctgctgtca

SEQ ID NO: 2802 - DNA, 60 bp, Artificial Sequence
  Probe
ggagcaaggtggtgggataagactgaatccactgtatttgctccgatggggaccattagg

SEQ ID NO: 2803 - DNA, 60 bp, Artificial Sequence
  Probe
ggaaggtctccatggagaaggtgtgctttgagatgaacactgaggaagtggtgggatcac

SEQ ID NO: 2804 - DNA, 60 bp, Artificial Sequence
  Probe
cggacactcctcttgctgatgccaccatctggttgaattgtgtcaatctccctagttgga

SEQ ID NO: 2805 - DNA, 60 bp, Artificial Sequence
  Probe
tatcctcaaatgcaaactgcggagtctgccacaaacgcgttggctttaaaactcatccct

SEQ ID NO: 2806 - DNA, 60 bp, Artificial Sequence
  Probe
gaacagagcatgcaatccatccccatgatcttaccctgggagcttgtccactatcctgtt

SEQ ID NO: 2807 - DNA, 60 bp, Artificial Sequence
  Probe
aagggagcccagaaatggaggacatttcattctttttcctgaggggaaggactgtgacct

SEQ ID NO: 2808 - DNA, 60 bp, Artificial Sequence
  Probe
gtgcgagctgttacgctggaaagaagatccttctccagaaaacagaaccctgtgggagaa

SEQ ID NO: 2809 - DNA, 60 bp, Artificial Sequence
  Probe
gcaggggctgttgtagaatccctctcaacttgtctgtgtcttaaacccggagtaccaacc

SEQ ID NO: 2810 - DNA, 60 bp, Artificial Sequence
  Probe
ggacatggttttgctgtgcttgccctggcttatttcagatttgaagacctccccgaagat

SEQ ID NO: 2811 - DNA, 60 bp, Artificial Sequence
  Probe
ccactcagccctgctctgctcagctgaagcagaaaacagagaccttttgcattactttgg

SEQ ID NO: 2812 - DNA, 60 bp, Artificial Sequence
  Probe
tgtaatctcaaagaacaggagacctgagggaagagaggcggacaaaggacacacactcct

SEQ ID NO: 2813 - DNA, 60 bp, Artificial Sequence
  Probe
gtccttctcaaaacacctaaacttgggagaacattgtcccccagtgctggggtaggagag

SEQ ID NO: 2814 - DNA, 60 bp, Artificial Sequence
  Probe
taggggatcagaatggtgacagttagggatggcatgatcccgggacaagaacagagagaa

SEQ ID NO: 2815 - DNA, 60 bp, Artificial Sequence
  Probe
tccagggaactgtggtcttacatgggggatacaagcacccctagatacacaccgacatag

SEQ ID NO: 2816 - DNA, 60 bp, Artificial Sequence
  Probe
ccacatctcttccaccttctagaggccacctgctttccttgactcatgatgccattcctc

SEQ ID NO: 2817 - DNA, 60 bp, Artificial Sequence
  Probe
tcaagcagaggacagaagggtccttctccttatgtgggaaatgggcctagtagatgcaga

SEQ ID NO: 2818 - DNA, 60 bp, Artificial Sequence
  Probe
ggggcctgagtggaggattatcagtatcacgatttgcaggattcccttctgggcttcatt

SEQ ID NO: 2819 - DNA, 60 bp, Artificial Sequence
  Probe
aactggtgggtagctgggctgtccgttaccaccacagctacatcttctgtttctttgaat

SEQ ID NO: 2820 - DNA, 60 bp, Artificial Sequence
  Probe
ttggacaggcatagctgcttggagatgtctctcagcagcagctgggtctttctttttact

SEQ ID NO: 2821 - DNA, 60 bp, Artificial Sequence
  Probe
cacagcggaatttctggccatgcttatttttgttctcctcagcctgggatccaccatcaa

SEQ ID NO: 2822 - DNA, 60 bp, Artificial Sequence
  Probe
aaacgtatgttgcaatctcgggctctacttgtggactttgttgcaccgaaagccttgagc

SEQ ID NO: 2823 - DNA, 60 bp, Artificial Sequence
  Probe
atgccttctcgctatgctgctatctataatggtggcgtggaggccgtttcaaccttactg

SEQ ID NO: 2824 - DNA, 60 bp, Artificial Sequence
  Probe
aagaaggattagcagccaggtctactatgaatccggaggccccattctcttctgctacca

SEQ ID NO: 2825 - DNA, 60 bp, Artificial Sequence
  Probe
gaccaaattttggtctggtgggaacagatgggaaccagctcaattgggtgtccactcaaa

SEQ ID NO: 2826 - DNA, 60 bp, Artificial Sequence
  Probe
gggtcagctccgatttgctgccaaactcattgagggtgtgttggatttcaaggtcatgat

SEQ ID NO: 2827 - DNA, 60 bp, Artificial Sequence
  Probe
aaaagtaggtcacatttcaagtaggtcatatttcgggggcgggtgcgcagacaaggagat

SEQ ID NO: 2828 - DNA, 60 bp, Artificial Sequence
  Probe
agctatagagtccttggtgaaacctcaggccaagaagaaggctggagaccaggaagaaga

SEQ ID NO: 2829 - DNA, 60 bp, Artificial Sequence
  Probe
actgcctcatagaaacgaactcagccgagatcacaaccttctcagggtacaggtgaagga

SEQ ID NO: 2830 - DNA, 60 bp, Artificial Sequence
  Probe
cacctttcggatcagtgatgagtctccacgtgaagacactggttctgcatggtgcatagg

SEQ ID NO: 2831 - DNA, 60 bp, Artificial Sequence
  Probe
gtgggcctactgtcttccctgatatggtcattctgtctccttgaagtgctagccctacct

SEQ ID NO: 2832 - DNA, 60 bp, Artificial Sequence
  Probe
gctctaagaacagcaaaaggatggatggagcagggtgagcagaaggtgtggaaagctaga

SEQ ID NO: 2833 - DNA, 60 bp, Artificial Sequence
  Probe
acattcttacaagcaatgcctccaaaagcaaaggaggatggggcaatctccttgatcccc

SEQ ID NO: 2834 - DNA, 60 bp, Artificial Sequence
  Probe
tacttcttgggacttctaccatgctcgtgtggcttggagtcatccgatacctcggtttct

SEQ ID NO: 2835 - DNA, 60 bp, Artificial Sequence
  Probe
tgttgatgccaaggctgaagaagactggatttgcaggcaaaagactgtcatttgaggcct

SEQ ID NO: 2836 - DNA, 60 bp, Artificial Sequence
  Probe
tcattggctccatcacctccattgggtactacatggttctgtcacctcaactgacaacgc

SEQ ID NO: 2837 - DNA, 60 bp, Artificial Sequence
  Probe
agtaacagacagatggatgtcccgaggcttggggaagtaacacgcagatgatttgcacaa

SEQ ID NO: 2838 - DNA, 60 bp, Artificial Sequence
  Probe
tacatcatccagagcggctgcggggaaattaacgacaacctgatggaactcctcatcatg

SEQ ID NO: 2839 - DNA, 60 bp, Artificial Sequence
  Probe
acacattcagaccccagatcctcctccacaaattcagagacccaagcacccaccaaatag

SEQ ID NO: 2840 - DNA, 60 bp, Artificial Sequence
  Probe
tggactgttgctgggatccccatcctatttctcagtgcctgtttcatcaccagatgtgtt

SEQ ID NO: 2841 - DNA, 60 bp, Artificial Sequence
  Probe
taagacggaactttgtgctgacggctgctcattgtgcaggaaggtctataacagtcaccc

SEQ ID NO: 2842 - DNA, 60 bp, Artificial Sequence
  Probe
cctgcgcaacccgtgtgctgaagaggatatgtttgcatggcaaattgatttcaatggtgg

SEQ ID NO: 2843 - DNA, 60 bp, Artificial Sequence
  Probe
caccgagtggctcaacctcatcttcaagtggtttctttttggagacaggcccttttggtg

SEQ ID NO: 2844 - DNA, 60 bp, Artificial Sequence
  Probe
gtgttcatgttgttcttcatcatgctctcgctgggctgcaccatggagttcagcaagatc

SEQ ID NO: 2845 - DNA, 60 bp, Artificial Sequence
  Probe
gtctgaacgattttaaaccattggctacacccctgcccctcctagagagccctctttgtt

SEQ ID NO: 2846 - DNA, 60 bp, Artificial Sequence
  Probe
aggggacccacctgaggtcccacagatataatttggtgccaggactagaatctgagtctg

SEQ ID NO: 2847 - DNA, 60 bp, Artificial Sequence
  Probe
aactagtgggttcaggagctcgagctagaagtggtgagaagggtttggatttggggtcta

SEQ ID NO: 2848 - DNA, 60 bp, Artificial Sequence
  Probe
agcacagttgtatatagagtggccactaatccagccacacagcagcatttccatctgcct

SEQ ID NO: 2849 - DNA, 60 bp, Artificial Sequence
  Probe
tcttctaggcagccatcagacacgttcaataacggaggttctgtgcgaatgagggcattt

SEQ ID NO: 2850 - DNA, 60 bp, Artificial Sequence
  Probe
tttctgacagcatgattggaaacgcaggcccttttcctttccgcacatatgggctaagtc

SEQ ID NO: 2851 - DNA, 60 bp, Artificial Sequence
  Probe
tccctgtcttcctgaagctgaagctatgttcgccattaatgcagatggagtgggagatgc

SEQ ID NO: 2852 - DNA, 60 bp, Artificial Sequence
  Probe
tcccccgcatcctttaatcccttcagtatgccaccttgcaaaatctccaagcctaggtaa

SEQ ID NO: 2853 - DNA, 60 bp, Artificial Sequence
  Probe
cggtgaagtactaagcgctagaggaagcagccaagtcggttagtggaagcatgattggtg

SEQ ID NO: 2854 - DNA, 60 bp, Artificial Sequence
  Probe
tgctctctgccacagcttgcagcatggtcttgactgaatgtactgttcctgttagcgtta

SEQ ID NO: 2855 - DNA, 60 bp, Artificial Sequence
  Probe
gcccttctctttcccaagacagtaatcctagagagtgcagggcaggaagtagtcccaaga

SEQ ID NO: 2856 - DNA, 60 bp, Artificial Sequence
  Probe
aggcggattgttgttagcgaccacggaagcagtcctatgaaagattagcccacctctttt

SEQ ID NO: 2857 - DNA, 60 bp, Artificial Sequence
  Probe
ttgatcaggtcagcaatgtgcacctatgtgactggtccttgccttttttgggttgtgtcc

SEQ ID NO: 2858 - DNA, 60 bp, Artificial Sequence
  Probe
acatttgaattgagccttgaagtctggggaatgcaccggggagcattaaggaaaggaagc

SEQ ID NO: 2859 - DNA, 60 bp, Artificial Sequence
  Probe
tggggtcctgactaggtggttttcacccaaaaaggtattaggggttacattgtgtgccct

SEQ ID NO: 2860 - DNA, 60 bp, Artificial Sequence
  Probe
agcatgtttaaacagggaccacctacacactaggccacatggtgatttggtagacctggg

SEQ ID NO: 2861 - DNA, 60 bp, Artificial Sequence
  Probe
gaccttcaggacaatggacagcagtaactccagcatgcagaggtaaggtgaaaaggagca

SEQ ID NO: 2862 - DNA, 60 bp, Artificial Sequence
  Probe
tcacttctatttcactacgccactgctcaaaaacctgcagttacccccagtcacgcttca

SEQ ID NO: 2863 - DNA, 60 bp, Artificial Sequence
  Probe
cgaatgtaaaaggctcacttgcctttggcttcctgttgacttcttcccgacccagaaagc

SEQ ID NO: 2864 - DNA, 60 bp, Artificial Sequence
  Probe
tccgcccctgacttcacttgataacaaactagaaactgaaacagggtcgggatgccgatg

SEQ ID NO: 2865 - DNA, 60 bp, Artificial Sequence
  Probe
acgaaagaagaagaagagcaaagggccttctgcagcaggggaacaggaacctgataaaga

SEQ ID NO: 2866 - DNA, 60 bp, Artificial Sequence
  Probe
gccacctgttctcaaaagcatgttggggaccaggaggtaaaactggccatttatggtgaa

SEQ ID NO: 2867 - DNA, 60 bp, Artificial Sequence
  Probe
ccccgtatcaagaaatttgccatctatcgatgggacccagacaaggctggagacaaacct

SEQ ID NO: 2868 - DNA, 60 bp, Artificial Sequence
  Probe
caagtcattgttgacattgctaggggacgaggggtgcctatgcagccagcttataagcta

SEQ ID NO: 2869 - DNA, 60 bp, Artificial Sequence
  Probe
agcataagaatcacctggagtccaggccccatgctcagggattgtggattttaagcctag

SEQ ID NO: 2870 - DNA, 60 bp, Artificial Sequence
  Probe
tgctggctaagcttgtcataagttcagtgtgacaccctttcccgtgatgggctgattaca

SEQ ID NO: 2871 - DNA, 60 bp, Artificial Sequence
  Probe
cggcaggatcctggcttcagctggatcacacctcttaccacattccaagttcctagtttc

SEQ ID NO: 2872 - DNA, 60 bp, Artificial Sequence
  Probe
cctcatttgaacgcgatcagcatgggtgcctttctggtccactcaacacctttgatcttg

SEQ ID NO: 2873 - DNA, 60 bp, Artificial Sequence
  Probe
tgaaagggaaagaaccaaaaagcacctgagagtgccaagaagtcctgaccgacacactct

SEQ ID NO: 2874 - DNA, 60 bp, Artificial Sequence
  Probe
acctgaccgtgctggagaaccccataacctctgcatctattagtgggaaagcagcttttc

SEQ ID NO: 2875 - DNA, 60 bp, Artificial Sequence
  Probe
acgattgctttcgttcgttaattctcacacaccacatccgactcgcactcacatccagct

SEQ ID NO: 2876 - DNA, 60 bp, Artificial Sequence
  Probe
tggtaaacgtcagtctcgtccctggtttctgacgtaattacctcccgtgttaccaggacg

SEQ ID NO: 2877 - DNA, 60 bp, Artificial Sequence
  Probe
ttcctggtctaccactggaccacatgactccaaaaccaacactgtgactgacgtcctcta

SEQ ID NO: 2878 - DNA, 60 bp, Artificial Sequence
  Probe
tctgtatcttgtttctattctggccctggcttgtgttctgcctttccaaagccctctcca

SEQ ID NO: 2879 - DNA, 60 bp, Artificial Sequence
  Probe
agctggagaagtccagctcagcctcagatgtttttgaacatctcttggcagaggatctgc

SEQ ID NO: 2880 - DNA, 60 bp, Artificial Sequence
  Probe
ccagagtcctggggatggcccagtctgagttcttcatggaaaattgtcctctgaatccac

SEQ ID NO: 2881 - DNA, 60 bp, Artificial Sequence
  Probe
ctggaagtgcttcggaaagaaggggacaatggcagaacaggtgttggtgacaattgtcac

SEQ ID NO: 2882 - DNA, 60 bp, Artificial Sequence
  Probe
aagcagcagagtgcttgatgtcattggagcttggagaaggggagacaggaagacaagaag

SEQ ID NO: 2883 - DNA, 60 bp, Artificial Sequence
  Probe
tcttgaggagcattaaggtatttcgaaactgccaagggtgctggtgcggatggacactaa

SEQ ID NO: 2884 - DNA, 60 bp, Artificial Sequence
  Probe
agtagagacatgcttccaacactcagaagcctatgtgaacactcagccagcaaagctggg

SEQ ID NO: 2885 - DNA, 60 bp, Artificial Sequence
  Probe
tgcttgggtccttcagagaagtgcacaaaatcagctgcatgctggttttacagctctgtg

SEQ ID NO: 2886 - DNA, 60 bp, Artificial Sequence
  Probe
tcagttgttggtctttgagctcctgttagtccagccgtctctcgtggtctcttttctcct

SEQ ID NO: 2887 - DNA, 60 bp, Artificial Sequence
  Probe
gtttggtgctctctgtgggtttaaggatttttcttccttccaaggatgggcatggagggc

SEQ ID NO: 2888 - DNA, 60 bp, Artificial Sequence
  Probe
ctacaacccccagcttacagatgagaaaactgaggctcataggggctaatggccagcatc

SEQ ID NO: 2889 - DNA, 60 bp, Artificial Sequence
  Probe
accaagaaaaggcccaagtgtttctctggcatctgatggtgtctggatccaccactctac

SEQ ID NO: 2890 - DNA, 60 bp, Artificial Sequence
  Probe
agccaatgagaaggaaacctcatctttgcatagcccatgcctcatggagaggtgacatca

SEQ ID NO: 2891 - DNA, 60 bp, Artificial Sequence
  Probe
tactccaagaagtacattgccttctgcatcagcatcttcacggccatcctggtgaccatc

SEQ ID NO: 2892 - DNA, 60 bp, Artificial Sequence
  Probe
agtttcccgttcctctcgtaacctggtcatgtgtccttcttcctggatactcatgacgca

SEQ ID NO: 2893 - DNA, 60 bp, Artificial Sequence
  Probe
gtggtccagaggaagctggaggtaaatgtagattccctggtcccacccacccttatagaa

SEQ ID NO: 2894 - DNA, 60 bp, Artificial Sequence
  Probe
ttttgaggacacaggcctagagcagttaagcagcttgctggaggttcactggctagaaag

SEQ ID NO: 2895 - DNA, 60 bp, Artificial Sequence
  Probe
tttctgcttcagtcacatctttgggtgcaattagcacttccccatgactctcccagctct

SEQ ID NO: 2896 - DNA, 60 bp, Artificial Sequence
  Probe
tgtctgtgagacaggagatgggtcatatgggctgggtcccgatatgtgaatggctcatta

SEQ ID NO: 2897 - DNA, 60 bp, Artificial Sequence
  Probe
taaggggagtgttaggagcagccaggactgtgtagtgtgtgtttggttgcatcacaaaca

SEQ ID NO: 2898 - DNA, 60 bp, Artificial Sequence
  Probe
caggtcactgtagcgggacttcttttggttttctttctctttggggcacctctggactca

SEQ ID NO: 2899 - DNA, 60 bp, Artificial Sequence
  Probe
accagccacttggaagacgaggttacgctgtgctttgaataagagcccagattttgagga

SEQ ID NO: 2900 - DNA, 60 bp, Artificial Sequence
  Probe
gagagacaatgatgaccctggaagtggggaggaggacttctgagaaacagcaacctctct

SEQ ID NO: 2901 - DNA, 60 bp, Artificial Sequence
  Probe
gagataaagggagagagtggtcagagataatgggtcactggcccaggtacagcatggagg

SEQ ID NO: 2902 - DNA, 60 bp, Artificial Sequence
  Probe
tctagtctgggccccccaagtagaaataggggtatctttgggttgggtaaccatctctgg

SEQ ID NO: 2903 - DNA, 60 bp, Artificial Sequence
  Probe
gcatacttgcctcttctggacagctgatccttagcagggaaaggtgctcccttttctctg

SEQ ID NO: 2904 - DNA, 60 bp, Artificial Sequence
  Probe
gaggctcctcatgcaactatctttatttccctgtcgcctctcagcactgcagcttcatgt

SEQ ID NO: 2905 - DNA, 60 bp, Artificial Sequence
  Probe
ttggtggctacaaggtgactctgggacagatgcatggccttttaacagaaaggagaacca

SEQ ID NO: 2906 - DNA, 60 bp, Artificial Sequence
  Probe
tcttccacgaggtagtgctgggactgtgagggaaattctcattgagagtgcagactccat

SEQ ID NO: 2907 - DNA, 60 bp, Artificial Sequence
  Probe
gccaagtgctgcaagtgagctgggagtgaccagaagaaatgacgcagaagtgaaatgaac

SEQ ID NO: 2908 - DNA, 60 bp, Artificial Sequence
  Probe
tcagctacccactatccttcgtgaacatcccctcccatcattacccttccctgcactaaa

SEQ ID NO: 2909 - DNA, 60 bp, Artificial Sequence
  Probe
agctgtttgtctgtaactgagtggggggatgctgccttgagcatctgtgagtgtgtattt

SEQ ID NO: 2910 - DNA, 60 bp, Artificial Sequence
  Probe
catcaacatcctcctcactgctcttctccctcctctgtagacgaaagcgccgtaacttca

SEQ ID NO: 2911 - DNA, 60 bp, Artificial Sequence
  Probe
gaacgtttgttttcccctctgtaaaatgggggttagattggccatgggagatgctggctg

SEQ ID NO: 2912 - DNA, 60 bp, Artificial Sequence
  Probe
ccatagagaagtgactggcctaggggcacagggtgaatttttggcacttagtgacacctc

SEQ ID NO: 2913 - DNA, 60 bp, Artificial Sequence
  Probe
tgaactcatcttagccttgttcagtggggagaacttccgctttggaaaccctctgcacat

SEQ ID NO: 2914 - DNA, 60 bp, Artificial Sequence
  Probe
gtggagctgacatctgaagtcactgcctgtcagggtagctataaaggagggaagcagagt

SEQ ID NO: 2915 - DNA, 60 bp, Artificial Sequence
  Probe
gctgcttgttgcctgctctgtcttgtgtgctgtgactgatgggcaggtttttagttactg

SEQ ID NO: 2916 - DNA, 60 bp, Artificial Sequence
  Probe
ccccacaactgtgacagcagcttcccatgatgcctttttcatcctcaaagcagatctgtg

SEQ ID NO: 2917 - DNA, 60 bp, Artificial Sequence
  Probe
tgcaagggcagctcaggatctttaaactccattccctcagggctcacagaagctgtaaaa

SEQ ID NO: 2918 - DNA, 60 bp, Artificial Sequence
  Probe
caaaccagaaacctccaattctcatgtggaagcccatgccctcaccctccaacatgaaag

SEQ ID NO: 2919 - DNA, 60 bp, Artificial Sequence
  Probe
cttggaagacatgctcaacagatccaatttcattgcagcagtcagtgtccaggctgcagg

SEQ ID NO: 2920 - DNA, 60 bp, Artificial Sequence
  Probe
caggctctggttctcagactgttctcacaatgcagatcaccaatcactcagggttggctt

SEQ ID NO: 2921 - DNA, 60 bp, Artificial Sequence
  Probe
cgccctgctccgttcctcccaaaactctgaatcgaagaactttccggaagtttctgagag

SEQ ID NO: 2922 - DNA, 60 bp, Artificial Sequence
  Probe
tcattcgtcttatttctgttcctctgggacaagaggagtggtgggccttcttccactcct

SEQ ID NO: 2923 - DNA, 60 bp, Artificial Sequence
  Probe
cagcaaggatgatttcttacttactctgtcagcccagcacctggcacaggttctcgacac

SEQ ID NO: 2924 - DNA, 60 bp, Artificial Sequence
  Probe
ccctaagacgtcccttttttctctgagtatctcctcgcaagctgggtaatcgatggggga

SEQ ID NO: 2925 - DNA, 60 bp, Artificial Sequence
  Probe
cgggccaccattaaggtcattcgacgcatgcagtactttgtggccaagaagaaattccag

SEQ ID NO: 2926 - DNA, 60 bp, Artificial Sequence
  Probe
ccctgctttcaagcctcttagcgcacctggaagcgacttagatactgttcccatttcaca

SEQ ID NO: 2927 - DNA, 60 bp, Artificial Sequence
  Probe
gtttcattcagtgtgagagtgaagaggccaacggggcaggtcatgtaacctctgtgtcag

SEQ ID NO: 2928 - DNA, 60 bp, Artificial Sequence
  Probe
ttctgctggggaccagaaaggagggacagcagggtatagtgaaagagtgctaagcttaca

SEQ ID NO: 2929 - DNA, 60 bp, Artificial Sequence
  Probe
agagagaacagccagtgcaaacctttgggcggaggagtgcttggtatatgtgagcaatag

SEQ ID NO: 2930 - DNA, 60 bp, Artificial Sequence
  Probe
caatctcagaatccagtccgcgtgatgatgctctcctcactggactgagtaggggtcaat

SEQ ID NO: 2931 - DNA, 60 bp, Artificial Sequence
  Probe
ggtccatacaggcactcagaggccaagtcaccttctatctagtggctctgccatataccc

SEQ ID NO: 2932 - DNA, 60 bp, Artificial Sequence
  Probe
ttgctgtttatcgatgctggttttcagaattcctgtgtggccctcctgtctggagtgaca

SEQ ID NO: 2933 - DNA, 60 bp, Artificial Sequence
  Probe
tgcatgtttctgagctcatcttcccagctctctccaggagctcctactcctgaatttcca

SEQ ID NO: 2934 - DNA, 60 bp, Artificial Sequence
  Probe
ttcaaatactgcccaacctcaaagcccagctccaaagctacctcctctgtgaagaactcc

SEQ ID NO: 2935 - DNA, 60 bp, Artificial Sequence
  Probe
atccaagtttcagaggcagaaaaaggctcgggaaggttaaatgacttgcccaagcacagc

SEQ ID NO: 2936 - DNA, 60 bp, Artificial Sequence
  Probe
gttctgtctgaacgcagagagtttgtttcgtccccttttccagtttctagaggcccctgg

SEQ ID NO: 2937 - DNA, 60 bp, Artificial Sequence
  Probe
ttcagaagggtgtggaatttgagcagaggcttcaaggatgaggtttggggatgaagggat

SEQ ID NO: 2938 - DNA, 60 bp, Artificial Sequence
  Probe
aaggagggcacctaaagtacttgacagcgagtgtgctgaggaaatcagcagctgttgaag

SEQ ID NO: 2939 - DNA, 60 bp, Artificial Sequence
  Probe
agcacaccttgatcagtgcataaagcctctgatcctccttagagaaggagggacttgggt

SEQ ID NO: 2940 - DNA, 60 bp, Artificial Sequence
  Probe
tgtaaattctttggtggcatggaacatctgagccctaaggatggcagaccttccaggagg

SEQ ID NO: 2941 - DNA, 60 bp, Artificial Sequence
  Probe
aagccagcagaggcaggtgtctggatccaggctttactgagttccaattccaagaaatca

SEQ ID NO: 2942 - DNA, 60 bp, Artificial Sequence
  Probe
gcaagttatcttggaagggggactggaagaacagtaattcggagtctgggcttggcagtt

SEQ ID NO: 2943 - DNA, 60 bp, Artificial Sequence
  Probe
ctgagatccagactggttagaagcctaacatgacctggcgtgtgagaccttgcactctct

SEQ ID NO: 2944 - DNA, 60 bp, Artificial Sequence
  Probe
aggagctccaagttaggcaggaaagccccaagcttacatttggatgggttgactatgagg

SEQ ID NO: 2945 - DNA, 60 bp, Artificial Sequence
  Probe
tgctgaaaagcatggtgctggtaacagttcaacaatccgtggctgctcattcttgcctac

SEQ ID NO: 2946 - DNA, 60 bp, Artificial Sequence
  Probe
gtttgacgcccagagtacaggataccacaatgcactcttcctgcgtagagcacatgttcc

SEQ ID NO: 2947 - DNA, 60 bp, Artificial Sequence
  Probe
ctgatcaacggctacatccagaagatcaagtcgggagaggaggactttgagtctctggcc

SEQ ID NO: 2948 - DNA, 60 bp, Artificial Sequence
  Probe
gaacacctgattactgggcacctgcatagtgctgccaggacctttcaaggttgtaggtag

SEQ ID NO: 2949 - DNA, 60 bp, Artificial Sequence
  Probe
aatggaaatgtgtcccggacagaaacagcttcgaccctcatagagaacaaggatggcacc

SEQ ID NO: 2950 - DNA, 60 bp, Artificial Sequence
  Probe
tagacagatgggtgacctgtctcctttgagaggatgctgaggcatctgtagcagctgttt

SEQ ID NO: 2951 - DNA, 60 bp, Artificial Sequence
  Probe
tgtttgggatgaccaggatcccaagcctcctgctgccacaatgtttataaaggccaaatg

SEQ ID NO: 2952 - DNA, 60 bp, Artificial Sequence
  Probe
ggactctttcatcatggaagatctgggggcagagggacttaaaaggtgggacaagccaaa

SEQ ID NO: 2953 - DNA, 60 bp, Artificial Sequence
  Probe
gcccctccctgggtgaggactttagtattatcataagaccagggtcattctcctggcctt

SEQ ID NO: 2954 - DNA, 60 bp, Artificial Sequence
  Probe
ccctggcatgcctggaccattaacccttagctcccttctgttcttctcttgtaaccaagg

SEQ ID NO: 2955 - DNA, 60 bp, Artificial Sequence
  Probe
aagcctcagcattcatgaaaatccactactccagacagacggctttggaatccaccagct

SEQ ID NO: 2956 - DNA, 60 bp, Artificial Sequence
  Probe
ttttgcccggcagcctctcaggttggacttctcaggatttgccatttgttttaatccctg

SEQ ID NO: 2957 - DNA, 60 bp, Artificial Sequence
  Probe
ccaccctggaggctacctcttctaagagtcccatctgctatgcccagccacattaactaa

SEQ ID NO: 2958 - DNA, 60 bp, Artificial Sequence
  Probe
gagagccttgcctttcacagcacagtgaggatgacattgcaccagggacagagattgtat

SEQ ID NO: 2959 - DNA, 60 bp, Artificial Sequence
  Probe
tagcgacagcggcttggaagtgctctaccagagttgcgatccattacaagattttggctt

SEQ ID NO: 2960 - DNA, 60 bp, Artificial Sequence
  Probe
gcggcctttacttctgtgggagtgggaactgttctctgtgacatcatcctgctcaacttc

SEQ ID NO: 2961 - DNA, 60 bp, Artificial Sequence
  Probe
cccggggattcagtagatctgaggtggggtcaaagaagcacatttggctaccaagtgatg

SEQ ID NO: 2962 - DNA, 60 bp, Artificial Sequence
  Probe
atccacgtggaacctaagtgctcagaccgaggaacagggactgagttaagaagtggacac

SEQ ID NO: 2963 - DNA, 60 bp, Artificial Sequence
  Probe
caggcactgtgctagggatatactggtgggtaaaacagactccctgtccttaaggagcca

SEQ ID NO: 2964 - DNA, 60 bp, Artificial Sequence
  Probe
catctgatgatggcctttgtgccccatcatcatatggcggaaggtgagagagagagcaag

SEQ ID NO: 2965 - DNA, 60 bp, Artificial Sequence
  Probe
gctgcattctgcacagatgtggtgcacttgctctgagacatttgagtcccaaagcttagc

SEQ ID NO: 2966 - DNA, 60 bp, Artificial Sequence
  Probe
aacagtgggtgccaactcatgctaacgcagcagttgcaaacattttgaagagagaccgtc

SEQ ID NO: 2967 - DNA, 60 bp, Artificial Sequence
  Probe
ccttgcaccatgtccctgcttgggtctcaagagcactactgtgacggttttccatcatat

SEQ ID NO: 2968 - DNA, 60 bp, Artificial Sequence
  Probe
cagtgggaagttctgctggggaaaacttcaggactcctacctaccaggatgtgactcact

SEQ ID NO: 2969 - DNA, 60 bp, Artificial Sequence
  Probe
gcaagcaagatgcccacacaacaggcttattttctgtgaaggaaccaactgatctccccc

SEQ ID NO: 2970 - DNA, 60 bp, Artificial Sequence
  Probe
caaggatctcaaagaagtcctccgttttccctggcaacagctcttcctgtcctcaggttg

SEQ ID NO: 2971 - DNA, 60 bp, Artificial Sequence
  Probe
agatgttttggttgtcccagctgatggaggtagatgctactggcatcaaacaggcagagg

SEQ ID NO: 2972 - DNA, 60 bp, Artificial Sequence
  Probe
caggaaacggattgatgggctgtgatggagggcttcagtcttatccaagaggcttggaat

SEQ ID NO: 2973 - DNA, 60 bp, Artificial Sequence
  Probe
agtatcaggagccctgaattctagtttcaccccttccacctacacaccgtgtgaccttgt

SEQ ID NO: 2974 - DNA, 60 bp, Artificial Sequence
  Probe
agttgtgctgactcagtcttaggcctggggacagtgggttagtcacaagttggtagaact

SEQ ID NO: 2975 - DNA, 60 bp, Artificial Sequence
  Probe
gggcagagaagagttgttctttgcagggactgcagcttttcttggtaatggtttgaggcc

SEQ ID NO: 2976 - DNA, 60 bp, Artificial Sequence
  Probe
gagaaaggcagtgttcaggtgtccatgtccccacccaactctggaggtaaatgacatgtc

SEQ ID NO: 2977 - DNA, 60 bp, Artificial Sequence
  Probe
agttccaagcaggcctcttgcactccctcctttcttaacccttccgtaactttccaacag

SEQ ID NO: 2978 - DNA, 60 bp, Artificial Sequence
  Probe
tggagacatataacttgaacacttggccctgatggggaagcagctctgcagggacttttt

SEQ ID NO: 2979 - DNA, 60 bp, Artificial Sequence
  Probe
acacaacagcctttttacccttaggaacagctttttgcccttagcactatgcttgggggc

SEQ ID NO: 2980 - DNA, 60 bp, Artificial Sequence
  Probe
gagctcacattcataggtgccgccagccttcgtgcatcttcttgcatcatctctaaggag

SEQ ID NO: 2981 - DNA, 60 bp, Artificial Sequence
  Probe
aaatggaaggcacaaaagagattcttgtgcgtttccatgcttgcggtttgttgggtgtgc

SEQ ID NO: 2982 - DNA, 60 bp, Artificial Sequence
  Probe
gagctcagacctgaggagagtgactagcttctctgtgtcccaggtaagcacttcggtcta

SEQ ID NO: 2983 - DNA, 60 bp, Artificial Sequence
  Probe
acccagaagctcaatgcacaccaaagtctcacatggttaaattgaggcaaggtgggcttg

SEQ ID NO: 2984 - DNA, 60 bp, Artificial Sequence
  Probe
cagggagtgagatttcccctgtgagtgaaatgccttctagtagtgaaccgtcctcgggag

SEQ ID NO: 2985 - DNA, 60 bp, Artificial Sequence
  Probe
ataggccaagtcagatgagggcagggaattgacctttggattcagcaacaggagctgatt

SEQ ID NO: 2986 - DNA, 60 bp, Artificial Sequence
  Probe
cacctccttccttcctaacctcacttcttactcccctttgctcactcttacctggctgct

SEQ ID NO: 2987 - DNA, 60 bp, Artificial Sequence
  Probe
accacactctcagggctccaagtggctttttctggttgtctcccatttttctctgtctcc

SEQ ID NO: 2988 - DNA, 60 bp, Artificial Sequence
  Probe
ctggcaacgttcccttcaagacacagaggagaaatccagatcattctcagcttcccaggc

SEQ ID NO: 2989 - DNA, 60 bp, Artificial Sequence
  Probe
agttcagtacatatgcattgagcacctgtgtgccagtcagccgagctatcacattgcaca

SEQ ID NO: 2990 - DNA, 60 bp, Artificial Sequence
  Probe
atagtgggtcccctgtgtaactcctatgatgctgctggtttgctaccaggtcagtggtta

SEQ ID NO: 2991 - DNA, 60 bp, Artificial Sequence
  Probe
cccactcacctccttatccaactctcacacacccaaaccaatgttaccccagcctcaatc

SEQ ID NO: 2992 - DNA, 60 bp, Artificial Sequence
  Probe
ggagaaaagacaccccagacttatcccaatgaggaacacggctgttgggtgcttgagtac

SEQ ID NO: 2993 - DNA, 60 bp, Artificial Sequence
  Probe
tgtcagagaacaacatggaggaatgagtgggaggagaagtcagagcggtaatagggccac

SEQ ID NO: 2994 - DNA, 60 bp, Artificial Sequence
  Probe
atgactccaacagctttgatttctgttctgcttcaggggcaaaggtccagatgaccctca

SEQ ID NO: 2995 - DNA, 60 bp, Artificial Sequence
  Probe
aggtcgctgcaggcataccttggagattttgcaggtttggttctagaccaccacactaag

SEQ ID NO: 2996 - DNA, 60 bp, Artificial Sequence
  Probe
ttgccccttccccatctccatttcacacaggtcctgaaagtctgtgtccaattatgcact

SEQ ID NO: 2997 - DNA, 60 bp, Artificial Sequence
  Probe
ttgctgctggtgatgacagatcagacgtctcatctcgctcttgatagcaaattggcaggc

SEQ ID NO: 2998 - DNA, 60 bp, Artificial Sequence
  Probe
gcccccaacacatggagccaagcacttgaacactcacaccatacccacaaacacatattc

SEQ ID NO: 2999 - DNA, 60 bp, Artificial Sequence
  Probe
gtccgtggagatcatgaggtctcctgcagctaagattccaaatgtccatggcccaaatgt

SEQ ID NO: 3000 - DNA, 60 bp, Artificial Sequence
  Probe
gttagacatcaaggtggaactgggaatagggaggcagaggaatgagcctggagttcagga

SEQ ID NO: 3001 - DNA, 60 bp, Artificial Sequence
  Probe
ccagcattgtgcaaggctcggaagagaaccaggaagtgaaactgggtgaaaacagaaagc

SEQ ID NO: 3002 - DNA, 60 bp, Artificial Sequence
  Probe
tcctggacatcctggtggtcttcatgaaaggctctcctgaggaaaagtctcgccttatgt

SEQ ID NO: 3003 - DNA, 60 bp, Artificial Sequence
  Probe
agaagcagcgattcctcagtaaacacatctctcaccgcggaggtgctggagaaaatttgg

SEQ ID NO: 3004 - DNA, 60 bp, Artificial Sequence
  Probe
ccttcacactaatgagccttctactgacccaagtttctttttctcgggcagcctgggacc

SEQ ID NO: 3005 - DNA, 60 bp, Artificial Sequence
  Probe
ggctggctgtgcccttccgtccttcattagacgtttgctcttgtcttagatgctcagatg

SEQ ID NO: 3006 - DNA, 60 bp, Artificial Sequence
  Probe
tagtttgagataagtggggctgggtgccagcaaatccagctttcaggaaggaaaaggagt

SEQ ID NO: 3007 - DNA, 60 bp, Artificial Sequence
  Probe
aacagcttgcagactccagtttcgaaatcctctctttgcagatggcgaccagtgtgagac

SEQ ID NO: 3008 - DNA, 60 bp, Artificial Sequence
  Probe
gctgccatcattccagcaatcagcaactccatgatgccacaccccactatacacaacaac

SEQ ID NO: 3009 - DNA, 60 bp, Artificial Sequence
  Probe
cggagggaagagagtcagagatctgcctatatctcctccaaggggaagtgcacctcctta

SEQ ID NO: 3010 - DNA, 60 bp, Artificial Sequence
  Probe
tgattgcgcattactcattcctttctcacacttccaccacagaggctgcctactttgcct

SEQ ID NO: 3011 - DNA, 60 bp, Artificial Sequence
  Probe
gttcacctgcagcttcttgttgctggggtaactttacccttgtaggcagctctagtggac

SEQ ID NO: 3012 - DNA, 60 bp, Artificial Sequence
  Probe
tcttcatgtcaccttcttgacagcatttgccaggcatccagcaggcgcttaataaatggc

SEQ ID NO: 3013 - DNA, 60 bp, Artificial Sequence
  Probe
aagctcctaaagggttcatttggcccctcctcaaagactaatgtccccatgtgaaagcgt

SEQ ID NO: 3014 - DNA, 60 bp, Artificial Sequence
  Probe
tggcatttatctttgtagcttctgtcatctggctcctctttgacatggcagctctccgcc

SEQ ID NO: 3015 - DNA, 60 bp, Artificial Sequence
  Probe
cactccctgaaaactcactcttgctttcagatttgagggccacttccacctcactaggcc

SEQ ID NO: 3016 - DNA, 60 bp, Artificial Sequence
  Probe
attggccaagcctgggtcacgtgtccattcccgcaactagagatagtgtcatctctagag

SEQ ID NO: 3017 - DNA, 60 bp, Artificial Sequence
  Probe
aggaggtagaaaggaacggaaaagtgctccaggtgtgtatctcagcttcctgtgctctgt

SEQ ID NO: 3018 - DNA, 60 bp, Artificial Sequence
  Probe
ctgcacctccctcagtgaggactgtaggaatttcagtattttagagatggtggccccgga

SEQ ID NO: 3019 - DNA, 60 bp, Artificial Sequence
  Probe
gcctggtttgtcacagctgagatacagctgcaccatggcaaactggtgaagcaacattag

SEQ ID NO: 3020 - DNA, 60 bp, Artificial Sequence
  Probe
ttttccctctcctgtccttgtgttgaaggcagtaaactaagggtgtcaagccccattccc

SEQ ID NO: 3021 - DNA, 60 bp, Artificial Sequence
  Probe
tgcaaagagtcctgcaatgaggatgtcattggggccctgctcaatgtgtttgtttggatc

SEQ ID NO: 3022 - DNA, 60 bp, Artificial Sequence
  Probe
tgcaccttcagaaacagtgctgaagcctttaaatgcagcatctgcgatgtgaggaaaggc

SEQ ID NO: 3023 - DNA, 60 bp, Artificial Sequence
  Probe
gccttacctgctctggggaattgcaggttgccacataacaaagcatttctgtgtgggtac

SEQ ID NO: 3024 - DNA, 60 bp, Artificial Sequence
  Probe
tctacatgtccacaggtccagttcacccacttccttgtcccgtatttagcagatggggaa

SEQ ID NO: 3025 - DNA, 60 bp, Artificial Sequence
  Probe
ggcaagtgcggctgtcctatgtctccttttccagaaggatgaagatgtctttgggactgg

SEQ ID NO: 3026 - DNA, 60 bp, Artificial Sequence
  Probe
ccccagagaccttgttcaggaaagggaatgagaacattccagcaattttccccccaccta

SEQ ID NO: 3027 - DNA, 60 bp, Artificial Sequence
  Probe
agatgacatttagtctaagtctgtggcaagcagcaaagcagggcatatgtggcagagcct

SEQ ID NO: 3028 - DNA, 60 bp, Artificial Sequence
  Probe
tggaaagtagaaggggagcgagctatgcagagaaatcacatggtgagacaggatgcagga

SEQ ID NO: 3029 - DNA, 60 bp, Artificial Sequence
  Probe
acttgttggccttgtgttctttccgacccaagacatggcttagtaagtgagcagtgtggt

SEQ ID NO: 3030 - DNA, 60 bp, Artificial Sequence
  Probe
cccctgattatgggcactatgatgacaaggataccctggacctcaacacccctgtggata

SEQ ID NO: 3031 - DNA, 60 bp, Artificial Sequence
  Probe
agccatcctgacccagcgaggagccaactatcccaaatatacctggggtgaaatatacca

SEQ ID NO: 3032 - DNA, 60 bp, Artificial Sequence
  Probe
tgaagaagtccaatgcaccgcttgtcaatgtgaccctctactatgaagcactgtgcggtg

SEQ ID NO: 3033 - DNA, 60 bp, Artificial Sequence
  Probe
ggaagcttcaatatcaaaggagcaggggattgttcaaagagggctctcgccagggaatga

SEQ ID NO: 3034 - DNA, 60 bp, Artificial Sequence
  Probe
ctggaataaccacaggaatgttggttggcttggaatggatgaagggaaatggaaccgggc

SEQ ID NO: 3035 - DNA, 60 bp, Artificial Sequence
  Probe
ataggctggatcctgctcactgcatcttattactccggtttcccctttgctttcagcagc

SEQ ID NO: 3036 - DNA, 60 bp, Artificial Sequence
  Probe
aaatgggaagccagttctgcaaattggcctttctgttctgtgaagtgccatctgtcggtg

SEQ ID NO: 3037 - DNA, 60 bp, Artificial Sequence
  Probe
gggtagacttatcaaggcacttgtggatgtaccccagcaggtgctatctcccatccttct

SEQ ID NO: 3038 - DNA, 60 bp, Artificial Sequence
  Probe
agttaaccgagagagcgagcatctacctcactggcaggatctgggattcccaaatggaat

SEQ ID NO: 3039 - DNA, 60 bp, Artificial Sequence
  Probe
tctttccccagcccttccagtgattaaaagccatgcagacggataagcagtctgtgatgg

SEQ ID NO: 3040 - DNA, 60 bp, Artificial Sequence
  Probe
gggcaaacctggaaattagctatgccaaaggacttcagaaactggcaagcaagctgagca

SEQ ID NO: 3041 - DNA, 60 bp, Artificial Sequence
  Probe
ctgtacagagaatacacctgcccctgtatatccttttttcccctcccctccctcccagtg

SEQ ID NO: 3042 - DNA, 60 bp, Artificial Sequence
  Probe
tggaggacctccgctgcaaatacatctccctcatctacaccaactatgtgagcatctgca

SEQ ID NO: 3043 - DNA, 60 bp, Artificial Sequence
  Probe
actccaaagaccctggatctcaaattccaacttctagctctgagactccagccctcaccc

SEQ ID NO: 3044 - DNA, 60 bp, Artificial Sequence
  Probe
caaatgcgaaagagtgggagatgtaagaggagcgtcgaatgagggcagcacagaacagtg

SEQ ID NO: 3045 - DNA, 60 bp, Artificial Sequence
  Probe
taaggtcagtgggccaaaacgaaaagaaaggtgaatggcttgcagggttttgctggagtt

SEQ ID NO: 3046 - DNA, 60 bp, Artificial Sequence
  Probe
cttgaaggatgagctgacatctcgctcagggccaaataaccgacttgcttactgcttgct

SEQ ID NO: 3047 - DNA, 60 bp, Artificial Sequence
  Probe
gagaggtgtcggtgggccttttttcttttcaactcttgtgtcaacgtcaagcccctccta

SEQ ID NO: 3048 - DNA, 60 bp, Artificial Sequence
  Probe
tccatcagaagctgtaggtgggtcattctagccatcatgccagcacagatctgtcttcct

SEQ ID NO: 3049 - DNA, 60 bp, Artificial Sequence
  Probe
cagtgcaggcaccctgggagctaaatgttactgtatgtaccagcagggctttgtgagaaa

SEQ ID NO: 3050 - DNA, 60 bp, Artificial Sequence
  Probe
cttctgtggctgctagtgagaacccaaaccagctcagccaattagagctccagttgtcac

SEQ ID NO: 3051 - DNA, 60 bp, Artificial Sequence
  Probe
agggtgtcctgaggtccaagattctggagcaatctgacccttctccaaaggctctgttat

SEQ ID NO: 3052 - DNA, 60 bp, Artificial Sequence
  Probe
aattgtgaaagccacttccaagggctgcatcactgttatagggggtggagacactgctac

SEQ ID NO: 3053 - DNA, 60 bp, Artificial Sequence
  Probe
gcccccgaagagaaggcgtctgtaggaccctggttattggctctcttcatttttgttgtc

SEQ ID NO: 3054 - DNA, 60 bp, Artificial Sequence
  Probe
gaatccttcagggcatggtttggaaggccaggtagggattcgcagaaacctagacacatc

SEQ ID NO: 3055 - DNA, 60 bp, Artificial Sequence
  Probe
cagacttacaagccttgaagccgggaagcacccgttgaaaagaacattcagagccgacta

SEQ ID NO: 3056 - DNA, 60 bp, Artificial Sequence
  Probe
tgaaatccttttggatggttttcccatccccacagactcacaggcatggctgatccgtat

SEQ ID NO: 3057 - DNA, 60 bp, Artificial Sequence
  Probe
caccaacctcactgggacacttttgccttcccgaaacactgatgagaccttctttggagt

SEQ ID NO: 3058 - DNA, 60 bp, Artificial Sequence
  Probe
aacaagaattgggatgccaagctacatggtgggatcctgcggatatttccagaggggaaa

SEQ ID NO: 3059 - DNA, 60 bp, Artificial Sequence
  Probe
cttggtaactgattacctgccaattgctaccgagaaggttggaggtggggaaggctttgt

SEQ ID NO: 3060 - DNA, 60 bp, Artificial Sequence
  Probe
ggagtactgcgatgaggggactttagaagaggtgtcaaggctgggacttcaggaacatgt

SEQ ID NO: 3061 - DNA, 60 bp, Artificial Sequence
  Probe
agagaagaatccttaaggagagaatttaccggctcactcaggcgcgacacgcactctgtc

SEQ ID NO: 3062 - DNA, 60 bp, Artificial Sequence
  Probe
ccctcacactacctgtcctgaatgcagcacgaactgtcatctttgtggcaactggagaag

SEQ ID NO: 3063 - DNA, 60 bp, Artificial Sequence
  Probe
tggtggcagccagtaggctggtctgctccttcctctctatttcatatgtgtatgaaggca

SEQ ID NO: 3064 - DNA, 60 bp, Artificial Sequence
  Probe
agcttgagtcaggacccttaattaagatcctcaattggctggagggcagatctcgcgagt

SEQ ID NO: 3065 - DNA, 60 bp, Artificial Sequence
  Probe
gccagaaaacagggaaagaggctgagaaaccgtggtaaccaagttttgctggcactttgt

SEQ ID NO: 3066 - DNA, 60 bp, Artificial Sequence
  Probe
tctctggaattgttttcagggccgtctcagtctcataaaaggggatcaggcaggaggagt

SEQ ID NO: 3067 - DNA, 60 bp, Artificial Sequence
  Probe
gttacttgtcctgatcactcagcctcactcagctgttccctcactcagccaggatgtctt

SEQ ID NO: 3068 - DNA, 60 bp, Artificial Sequence
  Probe
agtaggacccaggcagtaggttttactgagggaacggacatcctgttgcctttctcactc

SEQ ID NO: 3069 - DNA, 60 bp, Artificial Sequence
  Probe
ccacaacacagagatgggcttgatctgtcgcacattggaggcctgggatttatcttctcc

SEQ ID NO: 3070 - DNA, 60 bp, Artificial Sequence
  Probe
ggtttccagggggcgtgtgacttgtcaaagactaaggatttacaaggggacaggcagaaa

SEQ ID NO: 3071 - DNA, 60 bp, Artificial Sequence
  Probe
tgaatcctatccttaggaatcaccaaacaaccactttccaacctcactgccccaccaggc

SEQ ID NO: 3072 - DNA, 60 bp, Artificial Sequence
  Probe
aggaggtacagaagccggcaacgcttgctatttattttacaaactggactggctcaggca

SEQ ID NO: 3073 - DNA, 60 bp, Artificial Sequence
  Probe
atgctctgcgtcacttctgctcggactcataaatccacgtctctttgctttggccacttc

SEQ ID NO: 3074 - DNA, 60 bp, Artificial Sequence
  Probe
agaaaagagtgctccaaataggagaaacagcatgcagagccttgggctagggagaaaggc

SEQ ID NO: 3075 - DNA, 60 bp, Artificial Sequence
  Probe
aggagggaaagaaggacatgaggcaattcttcagagccgagctgtcgttaagagggtctt

SEQ ID NO: 3076 - DNA, 60 bp, Artificial Sequence
  Probe
acaccctgaaacaagtccgagtcaggccagacaagcatcccctgaaaaatactccctttg

SEQ ID NO: 3077 - DNA, 60 bp, Artificial Sequence
  Probe
tcgccacatccttatgggcaccggaagttcatcactatgtctgatggagccacttctaca

SEQ ID NO: 3078 - DNA, 60 bp, Artificial Sequence
  Probe
ccagttgcaggtggcctatcaccagctcttccaagaatacgacaaccacatcaagagcag

SEQ ID NO: 3079 - DNA, 60 bp, Artificial Sequence
  Probe
aatgtcttttccaggtggcttttttggaatcaggatgctgcgaagctgcctacgttgcat

SEQ ID NO: 3080 - DNA, 60 bp, Artificial Sequence
  Probe
cagccccacaccaagagtttttggaggtctgactccagcttttctcagtcactcagcatc

SEQ ID NO: 3081 - DNA, 60 bp, Artificial Sequence
  Probe
tttcatttcattccttggtcggggaggggggataaggctacaaaggggagaggagagaat

SEQ ID NO: 3082 - DNA, 60 bp, Artificial Sequence
  Probe
actagtccctgggctgtcatcaaatgtacccatgataccgtggtaccatctagctggtgc

SEQ ID NO: 3083 - DNA, 60 bp, Artificial Sequence
  Probe
aggtcccatggaaaatgaccacaggcaatgagaaagccatagagtgctgcctgtgagatc

SEQ ID NO: 3084 - DNA, 60 bp, Artificial Sequence
  Probe
gatgggctgtctccccatttctaacctgagtggttcctcctctgattccatggaccttct

SEQ ID NO: 3085 - DNA, 60 bp, Artificial Sequence
  Probe
cctgaccttactttcctccctccctgtttcctctttgtggtgtttccactggccaaactc

SEQ ID NO: 3086 - DNA, 60 bp, Artificial Sequence
  Probe
tagaacacagcttcccccagcccacttccctgttctaaagacaccacatagacagagagc

SEQ ID NO: 3087 - DNA, 60 bp, Artificial Sequence
  Probe
tgttgaacctttttagggggtgatggtgggaatgggacaaaaagacagctacgtgggtca

SEQ ID NO: 3088 - DNA, 60 bp, Artificial Sequence
  Probe
aggcatgctgattctcagtccagtgttcttttcgctgcccgagtctgccttctttgttag

SEQ ID NO: 3089 - DNA, 60 bp, Artificial Sequence
  Probe
catttcaggaaatgaacaggaagtgcaaagcccctgaggtaggagagtgccccaggtatg

SEQ ID NO: 3090 - DNA, 60 bp, Artificial Sequence
  Probe
ttgagacatatgtatccaactgccagaacatctccagtggacagcctttgggcacaaggc

SEQ ID NO: 3091 - DNA, 60 bp, Artificial Sequence
  Probe
ggttttgtgctgctttctgtcttttttggaagtcgggaggggcacacaaaccagaaggaa

SEQ ID NO: 3092 - DNA, 60 bp, Artificial Sequence
  Probe
gctgcctagaggctgactcaactgaaatcatggcgtttgacagcacttggaaggtagacc

SEQ ID NO: 3093 - DNA, 60 bp, Artificial Sequence
  Probe
tgtaaactgggagtggcggtacctcccttgcagatacactcaccttgaaagctgcaaaac

SEQ ID NO: 3094 - DNA, 60 bp, Artificial Sequence
  Probe
ggcaagtggtgtggttctagccgtgaagacacaaaagcttccaaaaccaaagtcaggcag

SEQ ID NO: 3095 - DNA, 60 bp, Artificial Sequence
  Probe
ccaagagtggtgcaggaagtacatgaaatcagggaatgtcaaggacctcacccaagcctg

SEQ ID NO: 3096 - DNA, 60 bp, Artificial Sequence
  Probe
aatcagcctctccttggagtcagtctaaatggatgtgaagccacttcgtccaagtcccct

SEQ ID NO: 3097 - DNA, 60 bp, Artificial Sequence
  Probe
gtcaggactgaaaagggctcatattctagaaggggcagcagagatgaagcctttggcagc

SEQ ID NO: 3098 - DNA, 60 bp, Artificial Sequence
  Probe
attttcctaagcatccagctattggtgtgagggcatgctctggcaccatggaagcttact

SEQ ID NO: 3099 - DNA, 60 bp, Artificial Sequence
  Probe
agacccagaatctggtctgtgcttcattcaccttagcttccagagacggtgactctgcag

SEQ ID NO: 3100 - DNA, 60 bp, Artificial Sequence
  Probe
gcagggctgggatgcatgccagactagacccagactcttcgttaacattttctgctcttg

SEQ ID NO: 3101 - DNA, 60 bp, Artificial Sequence
  Probe
agttgctggttgggattattgggcttcaccactggatcttaagagccctttcccgacttg

SEQ ID NO: 3102 - DNA, 60 bp, Artificial Sequence
  Probe
atagtttcactgccccctgggttctcccaacgctgctccttacctagaaggaaagaatct

SEQ ID NO: 3103 - DNA, 60 bp, Artificial Sequence
  Probe
ttgctgctgcctattgtagatctgggaaggtaaggctctaaagccctctgggctagtgac

SEQ ID NO: 3104 - DNA, 60 bp, Artificial Sequence
  Probe
ctgctcagcaaggaactgcggagcttcctgacagctcttgtatcactgctctctgtctat

SEQ ID NO: 3105 - DNA, 60 bp, Artificial Sequence
  Probe
ccaatgaacgtttgtgcgtcaggtttgagtttctgtccaaactgaggcatcaccacaggc

SEQ ID NO: 3106 - DNA, 60 bp, Artificial Sequence
  Probe
ggtacctggaagccaagtgtagacagtctaccaaggagggtggacaaatgggtgaagtga

SEQ ID NO: 3107 - DNA, 60 bp, Artificial Sequence
  Probe
tcttaatgatgcccctgtgtctagggtatgccaggtcctgtctgccattgcctgagatag

SEQ ID NO: 3108 - DNA, 60 bp, Artificial Sequence
  Probe
ccccggaatgtacagtgtcttggtgcaccaagatgccttctaaaggctgacataccttgg

SEQ ID NO: 3109 - DNA, 60 bp, Artificial Sequence
  Probe
acccagaccatgccaaagtccagtctgaaatgaaaggggacagaagtcttgctgtccatg

SEQ ID NO: 3110 - DNA, 60 bp, Artificial Sequence
  Probe
tccttgagatggcagcaggagtcatattttctgtgtgtgtgtttcggaaagccgctgtgt

SEQ ID NO: 3111 - DNA, 60 bp, Artificial Sequence
  Probe
gggtgtattggcttgggagtagaagaagggtcgtccctgctgcagaagctgtatactgat

SEQ ID NO: 3112 - DNA, 60 bp, Artificial Sequence
  Probe
aatcattcctgcccaccagtatgccgtgtcaatttactattcccatggcaacacccagga

SEQ ID NO: 3113 - DNA, 60 bp, Artificial Sequence
  Probe
ggggcaatctaggataatacagcagccccaaagcagcagagagtcaagtgccttcctttt

SEQ ID NO: 3114 - DNA, 60 bp, Artificial Sequence
  Probe
ccccagaggaagtaaggtcttcatcatccagtggcctggactcaactccagatgtcagtg

SEQ ID NO: 3115 - DNA, 60 bp, Artificial Sequence
  Probe
gcaaggaggcttttcctcccggtaggcttgatttgcatttcactttcactttcgtggctg

SEQ ID NO: 3116 - DNA, 60 bp, Artificial Sequence
  Probe
ctcttcagcatccttgaaccacttgctggtggtacttacatggttacatgtggccgggac

SEQ ID NO: 3117 - DNA, 60 bp, Artificial Sequence
  Probe
acagggatgacagtgtgggtagaccaaggcagacagacttcataggacattgcaccagaa

SEQ ID NO: 3118 - DNA, 60 bp, Artificial Sequence
  Probe
gctgtggagggcagcatgaaagagaacatctccaagctgctcaagtccaagaacttgact

SEQ ID NO: 3119 - DNA, 60 bp, Artificial Sequence
  Probe
tacagtccctctcgaagatgcttttgaaagatgtggaggaagagaagggcgtgctcgtgt

SEQ ID NO: 3120 - DNA, 60 bp, Artificial Sequence
  Probe
aatcccccattccaaaagtccaggccaaatggtgggcttagcctctttgaaaagttctgc

SEQ ID NO: 3121 - DNA, 60 bp, Artificial Sequence
  Probe
aggttgtagggtttcttcagtgcccgtggtcatcgaccccttgacaagaagagagaagag

SEQ ID NO: 3122 - DNA, 60 bp, Artificial Sequence
  Probe
agggaaacacttgcatctcaaggtggaaaggatagaggtggtgttttgtgggctcctgtg

SEQ ID NO: 3123 - DNA, 60 bp, Artificial Sequence
  Probe
tctgcctggtttctgaccctttgtctctttcggttctcttgcttgccctgtgtgtttgat

SEQ ID NO: 3124 - DNA, 60 bp, Artificial Sequence
  Probe
tgcctgtctgttacactggaggagagaagaatgagcctacgctgaagatggcatcctgtg

SEQ ID NO: 3125 - DNA, 60 bp, Artificial Sequence
  Probe
cgtggtcagacaactgaaaatctggagaaggtccattccaggcaaagggaagaacctggg

SEQ ID NO: 3126 - DNA, 60 bp, Artificial Sequence
  Probe
acaaggctgcaccttgaactgtcccttcggtttccttactgatgcccaaaactgtgagat

SEQ ID NO: 3127 - DNA, 60 bp, Artificial Sequence
  Probe
agctctattgccaccatgagtttctccggcaagtaccaactgcagagccaggaaaacttt

SEQ ID NO: 3128 - DNA, 60 bp, Artificial Sequence
  Probe
agagatctcttcgatttctttcaggcctgaggcttttgtgaaatgcgtcagccccctgtg

SEQ ID NO: 3129 - DNA, 60 bp, Artificial Sequence
  Probe
tgggcacatgatctgctactgggatggctctgctcattatctgatgtacctggtgatggt

SEQ ID NO: 3130 - DNA, 60 bp, Artificial Sequence
  Probe
cacactaccagaaagaagcaagggccttcaggttcctcacactcagtcctggagtgatct

SEQ ID NO: 3131 - DNA, 60 bp, Artificial Sequence
  Probe
tccttcaatgcatggcccataaccattaaagcagaggtcttctcactgtgcggtcccatc

SEQ ID NO: 3132 - DNA, 60 bp, Artificial Sequence
  Probe
aaggaggatcaagacccgtaatccggcataacaccctggggttttccactctttcagaga

SEQ ID NO: 3133 - DNA, 60 bp, Artificial Sequence
  Probe
tgctcagctactggcacgacttctaagctctgtgtccctccaccttctcacctgaaaatt

SEQ ID NO: 3134 - DNA, 60 bp, Artificial Sequence
  Probe
agggggaagtgagaacgtgacagagaagcaagtgctgggtttggtggagttgatatttgc

SEQ ID NO: 3135 - DNA, 60 bp, Artificial Sequence
  Probe
tccatctacctactctccatctacccatcatcccttcaccccccgtccatcatgatccat

SEQ ID NO: 3136 - DNA, 60 bp, Artificial Sequence
  Probe
aaagccactgaaatttgatctcctccttcacacattcccaggtccccaatatgccaccca

SEQ ID NO: 3137 - DNA, 60 bp, Artificial Sequence
  Probe
aaggaatttgacaagaagtacaatcccacctggcattgcatcgtggggaggaacttcggt

SEQ ID NO: 3138 - DNA, 60 bp, Artificial Sequence
  Probe
ctttgggctacaggacgattcgaaggtctttaaggaggggagttgcttactcgccgatga

SEQ ID NO: 3139 - DNA, 60 bp, Artificial Sequence
  Probe
gcgtggtaaaagaaatcattgagtcccccgccttcagaagagggtgcattttcaggagga

SEQ ID NO: 3140 - DNA, 60 bp, Artificial Sequence
  Probe
aacttcagcgaggccaaacacatgtccttgaagatggcatatgtctcgaagaggtgcacc

SEQ ID NO: 3141 - DNA, 60 bp, Artificial Sequence
  Probe
cccccccccaatcggactgccaaattctccggtttgccccgggatattatagaaaattat

SEQ ID NO: 3142 - DNA, 60 bp, Artificial Sequence
  Probe
gggagatgatcatgggaggaaccatgtgaaaggagttggggggaaggcaatttaagggtt

SEQ ID NO: 3143 - DNA, 60 bp, Artificial Sequence
  Probe
atttacagccaaggaacatggcgtggaggggtggtgttagcaggtggaaagttactaagc

SEQ ID NO: 3144 - DNA, 60 bp, Artificial Sequence
  Probe
tttggagtgtttccctgatccagagctgggaggtccagaacagagggttaaggatggaaa

SEQ ID NO: 3145 - DNA, 60 bp, Artificial Sequence
  Probe
gtgcaacacatatgagcatgaaggggcccatgccaaatgtatagtgcagcaggagcaaag

SEQ ID NO: 3146 - DNA, 60 bp, Artificial Sequence
  Probe
ccgccaccaaaatgtagattttcctgaaaacccttacagggaagaccaccaccctcgagg

SEQ ID NO: 3147 - DNA, 60 bp, Artificial Sequence
  Probe
atccttgctccaagagactcagtacaaacctcaaacacaaagctgtgctctgcatggcca

SEQ ID NO: 3148 - DNA, 60 bp, Artificial Sequence
  Probe
gtttgtccttgtaggcatgggccagatctccaactatgtggcagcatttgtcctgggtat

SEQ ID NO: 3149 - DNA, 60 bp, Artificial Sequence
  Probe
actttgccgttgaagctgctaactaccaagacactattggccgcctgcaggatgagattc

SEQ ID NO: 3150 - DNA, 60 bp, Artificial Sequence
  Probe
tagggcccacttcctggtttgcagatggtcctcttcttgctgtatcctcacatagcaaga

SEQ ID NO: 3151 - DNA, 60 bp, Artificial Sequence
  Probe
tcctcactgtcctgttttcttaggcactgagggatctgagtaggtctgggatggacagga

SEQ ID NO: 3152 - DNA, 60 bp, Artificial Sequence
  Probe
tcccctaaattcagaggaatgcagctatgccagaagccagagaagagccactcgtagctt

SEQ ID NO: 3153 - DNA, 60 bp, Artificial Sequence
  Probe
cattggcaacccagcacccagttaaattccccttgtcactgtttccacattgtccccatc

SEQ ID NO: 3154 - DNA, 60 bp, Artificial Sequence
  Probe
agctggagcccagctctgcttgaacctattttaggtctctgatccccgcttcctctttag

SEQ ID NO: 3155 - DNA, 60 bp, Artificial Sequence
  Probe
gagatgtcgaggagccagaagaggttcaggagttgctgattgcagtatgaggcacagtga

SEQ ID NO: 3156 - DNA, 60 bp, Artificial Sequence
  Probe
aaacatccagcttcttcctgctcactgacaactgccaccaattatcgctccacttccagg

SEQ ID NO: 3157 - DNA, 60 bp, Artificial Sequence
  Probe
gcaagctcaagtcttagagctttgggctcaacaagggctttcacttgccattgcagaagg

SEQ ID NO: 3158 - DNA, 60 bp, Artificial Sequence
  Probe
catgaaagtcctgctttgtgacctgctgctgctcagtctcttctccagtgtgttcagcag

SEQ ID NO: 3159 - DNA, 60 bp, Artificial Sequence
  Probe
ggcagcttccttgaaccattatgctggctatgagcaggtcaccaatgaagacctcctgac

SEQ ID NO: 3160 - DNA, 60 bp, Artificial Sequence
  Probe
cctgcctgatctgtggagatgaagcttctgggtgtcactatggagctctcacatgtggaa

SEQ ID NO: 3161 - DNA, 60 bp, Artificial Sequence
  Probe
ccaggagacccacaggtatgaccttctaggaagctccagttcgatgggcccaattcttac

SEQ ID NO: 3162 - DNA, 60 bp, Artificial Sequence
  Probe
aaactgtttgagcaggagtgagtcacagtgaaaccagcttccctgtaaccacagggcttg

SEQ ID NO: 3163 - DNA, 60 bp, Artificial Sequence
  Probe
gtcagggtggactcaatctttctggttctccacagaagacgtctctgcaagaagcctgga

SEQ ID NO: 3164 - DNA, 60 bp, Artificial Sequence
  Probe
gtgatggtcattgggacctgcacctgtcacaccaactgtcctaagaacaatgaggccttc

SEQ ID NO: 3165 - DNA, 60 bp, Artificial Sequence
  Probe
cgcagttgcagtcagacacagacaaggagagtgggagaaagggagacaggaagagaaaca

SEQ ID NO: 3166 - DNA, 60 bp, Artificial Sequence
  Probe
tacctttaatggctccttgagggccaccagataagatctgaactcctgagcctggcatgt

SEQ ID NO: 3167 - DNA, 60 bp, Artificial Sequence
  Probe
agggtagacaggcaataaccacctaatgtcaggtggcaagcatgagtgaggggaagaaga

SEQ ID NO: 3168 - DNA, 60 bp, Artificial Sequence
  Probe
ctaccctcaagttctacaggttcaccagatgccccaggaggtcctagatgcattgatggg

SEQ ID NO: 3169 - DNA, 60 bp, Artificial Sequence
  Probe
tcatgctcaacaatgccattgaagtgcacggtgtgttgccacgatttgaccctcaacttc

SEQ ID NO: 3170 - DNA, 60 bp, Artificial Sequence
  Probe
acctgcccagccattgttgccgatgttcatttgtaatgctgccttaaggagatgaggaga

SEQ ID NO: 3171 - DNA, 60 bp, Artificial Sequence
  Probe
ttttgggaagccctcaggacacttacacaggcttgtgaatcaatcacatgctcagcaggt

SEQ ID NO: 3172 - DNA, 60 bp, Artificial Sequence
  Probe
ccacccccactgtgtttggcgcttaataggttggagaagaggacctgagcaactgaaatc

SEQ ID NO: 3173 - DNA, 60 bp, Artificial Sequence
  Probe
aaaacagggtccaccttggctcagtcctctcctttcatccctctccaggcaaaaacaaag

SEQ ID NO: 3174 - DNA, 60 bp, Artificial Sequence
  Probe
tcacaggtgcttccccaaacttgagccttcataaacccaggcagaactgcttctttgact

SEQ ID NO: 3175 - DNA, 60 bp, Artificial Sequence
  Probe
gtctgtggaagctgagggagagcaccaaattcagtttgggaagtcagggaaggcttcttg

SEQ ID NO: 3176 - DNA, 60 bp, Artificial Sequence
  Probe
cttagtggatgggtgtgtgtgtgtgtgtgttgggggtggtgatcaggcaggttcataaat

SEQ ID NO: 3177 - DNA, 60 bp, Artificial Sequence
  Probe
ttgctgggactgtagcgtttgcaggaagtcacttaactgtttgggagctggaaaaccgaa

SEQ ID NO: 3178 - DNA, 60 bp, Artificial Sequence
  Probe
aatgaaatgatgtccccaaggactaggccacgcaggtccactggctattctgaggtgata

SEQ ID NO: 3179 - DNA, 60 bp, Artificial Sequence
  Probe
acaatgctccagagcatgctttgcgacctggtttcttatccacttttgcccttgcaacag

SEQ ID NO: 3180 - DNA, 60 bp, Artificial Sequence
  Probe
aatcccgaccagaagggtaagattaggagaatcgactgcctgcgacaggcagacaaagtc

SEQ ID NO: 3181 - DNA, 60 bp, Artificial Sequence
  Probe
gaacacgtgacttctcacaaggccttgatttcttcattcacagcccgggaggggataagc

SEQ ID NO: 3182 - DNA, 60 bp, Artificial Sequence
  Probe
aatacacagagatacgggagtcttggcagagaagctgctcaggcacatgttggagaacca

SEQ ID NO: 3183 - DNA, 60 bp, Artificial Sequence
  Probe
ccgtcttttttctcctgtgtccccagtgactattttctgcccttggggctgattttccct

SEQ ID NO: 3184 - DNA, 60 bp, Artificial Sequence
  Probe
aaaggggagaaattagggttttccggaacccccacacatttgtggttgggaaagactcct

SEQ ID NO: 3185 - DNA, 60 bp, Artificial Sequence
  Probe
aattttccatcctctgaccccctcactctgttcattggccacaaatccccactggtcttg

SEQ ID NO: 3186 - DNA, 60 bp, Artificial Sequence
  Probe
gcttctacttgtccacaatctgccccagcatctttttggctacagctggtacaaagggga

SEQ ID NO: 3187 - DNA, 60 bp, Artificial Sequence
  Probe
tgggtggagtgaacagcaacagatactgaatgggacacccctgtacatgtaccaggactg

SEQ ID NO: 3188 - DNA, 60 bp, Artificial Sequence
  Probe
cttttgaaggcaaggagttctcagagcaaccaaaggaacgtgacccaagagcccagctta

SEQ ID NO: 3189 - DNA, 60 bp, Artificial Sequence
  Probe
tgtggaccagagagacactgatatggatggggttggagatcagtgtgacaattgcccctt

SEQ ID NO: 3190 - DNA, 60 bp, Artificial Sequence
  Probe
gtgagacctgagcacatcacctgacttccctgactgtttcccagtttcgcaacagcaatt

SEQ ID NO: 3191 - DNA, 60 bp, Artificial Sequence
  Probe
taatgggtagtggggactgaggaactatggaatgatggtgagagccaagggggcaatgaa

SEQ ID NO: 3192 - DNA, 60 bp, Artificial Sequence
  Probe
gtaggattgtctgcagtgagctttgggaagcaccaccctttcccgactcctgttttcatc

SEQ ID NO: 3193 - DNA, 60 bp, Artificial Sequence
  Probe
ttcacctggggctctgccagacggttaccacattaccaggactcttggtacaaatgagaa

SEQ ID NO: 3194 - DNA, 60 bp, Artificial Sequence
  Probe
agggctcaccgtggctaagagtgtcctaggagtatcctcatttggggtagctagaggaac

SEQ ID NO: 3195 - DNA, 60 bp, Artificial Sequence
  Probe
catcatccaggagttcttcagctctgagcagtacagaacaggaaagcccatccctgacca

SEQ ID NO: 3196 - DNA, 60 bp, Artificial Sequence
  Probe
actgaggccacacatcatttccagtcatctgtgtgtttttaaggccagccacttgtccct

SEQ ID NO: 3197 - DNA, 60 bp, Artificial Sequence
  Probe
agtctcttggccctagttgtgttcccatactagggagtgtcttgtctattcccgggacct

SEQ ID NO: 3198 - DNA, 60 bp, Artificial Sequence
  Probe
atctgtgaccgcttctaccccaatgacttgtgggtggttgtgttccagtttcagcacatc

SEQ ID NO: 3199 - DNA, 60 bp, Artificial Sequence
  Probe
acgcagtcttctccactagtgttgacccacccaagttttttttaccctcagcttgccagg

SEQ ID NO: 3200 - DNA, 60 bp, Artificial Sequence
  Probe
aagcatccagtggaatcccacctggtgtttactgtgggcagaggtgaatctgtggttttt

SEQ ID NO: 3201 - DNA, 60 bp, Artificial Sequence
  Probe
tgagaggctccgagaaatgcagtctttcttcggcttagaggtgactggcaaacttgacga

SEQ ID NO: 3202 - DNA, 60 bp, Artificial Sequence
  Probe
tgcctaatgcttgtatgtgtggaaggcaaggtgctcactgttctggaggcagcctatttc

SEQ ID NO: 3203 - DNA, 60 bp, Artificial Sequence
  Probe
tcaggaaactaacaaggtggagacgtacaaagagcagccgctcaagacacctgggaagaa

SEQ ID NO: 3204 - DNA, 60 bp, Artificial Sequence
  Probe
gaggaattgtgggaggaaaagcactgggcagaaggtctcagtcaaatgcacctgcagtta

SEQ ID NO: 3205 - DNA, 60 bp, Artificial Sequence
  Probe
tctgtgctggtcgggaacattaacatgtgggtgtatcggatggagacgattctccactgg

SEQ ID NO: 3206 - DNA, 60 bp, Artificial Sequence
  Probe
ggcgtggccttatcgattgcagtgggaagttgttgaagacttgaagacgtgattcctgct

SEQ ID NO: 3207 - DNA, 60 bp, Artificial Sequence
  Probe
caaagacgtgcccactgggtgaatgggtatgtcgacatggtcctagtctgagtgtaggtg

SEQ ID NO: 3208 - DNA, 60 bp, Artificial Sequence
  Probe
aaagaatttcaggccgagggaaccaggatgcagaaacctgaggcagagcttgctagtttc

SEQ ID NO: 3209 - DNA, 60 bp, Artificial Sequence
  Probe
tgtgccaaagaatctcacgattgctgcctattggaatgcgaaaacgcaagcgtgacaacc

SEQ ID NO: 3210 - DNA, 60 bp, Artificial Sequence
  Probe
tgtcaactggccctgtgtaaagccacgtcactgtttctgtagagagcatgacacgtcaga

SEQ ID NO: 3211 - DNA, 60 bp, Artificial Sequence
  Probe
tagtgagaaagggtcgctgttcctgcatcagcaccaaccaagggactatccacctacaat

SEQ ID NO: 3212 - DNA, 60 bp, Artificial Sequence
  Probe
gtgtgacagaacgcatgccaaccccagttattaaagcttttggcatcttgaagcgagcgg

SEQ ID NO: 3213 - DNA, 60 bp, Artificial Sequence
  Probe
aacaagcagatgaagactctgagaggggtttggagtctggaagcctcatcccttcagcat

SEQ ID NO: 3214 - DNA, 60 bp, Artificial Sequence
  Probe
ttcaaatgcctcttccctcctaggcaggatgactcagtacctttcagcaactgctctcgg

SEQ ID NO: 3215 - DNA, 60 bp, Artificial Sequence
  Probe
agtcacagggtcatggagggaataaactggagagcgtttggtatgtgctcagtgtctgct

SEQ ID NO: 3216 - DNA, 60 bp, Artificial Sequence
  Probe
agttcctcttgaggtgtttgactgttggccaaagtcttcccttggttgcttctcacacgg

SEQ ID NO: 3217 - DNA, 60 bp, Artificial Sequence
  Probe
cggtttgagaaaagaaagggcaggcacaccaagtcactgctctgctactcagttggaaca

SEQ ID NO: 3218 - DNA, 60 bp, Artificial Sequence
  Probe
tttccagtgtccctgggtcactctcttggtctcctttgagccttttgtactctcgccttc

SEQ ID NO: 3219 - DNA, 60 bp, Artificial Sequence
  Probe
ggaggtcattcatgcccgtcaaggttgttgtgagactggaatcgccaggcacatctaaag

SEQ ID NO: 3220 - DNA, 60 bp, Artificial Sequence
  Probe
gccttcgacattctaggtgcagcaggccaggacaagctcttgtatctgaagcacaaactg

SEQ ID NO: 3221 - DNA, 60 bp, Artificial Sequence
  Probe
gtcacgtacactgccaggtagcataggttggcacagcttctaaggagtggagctgatgaa

SEQ ID NO: 3222 - DNA, 60 bp, Artificial Sequence
  Probe
tgcactcatacgatctgggcatgaaccacctgggagacatgaccagtgaagaagtgatgt

SEQ ID NO: 3223 - DNA, 60 bp, Artificial Sequence
  Probe
ggcccgcatcatgattaaagaatgtggatccctctgtctggggtgggatgccttactttg

SEQ ID NO: 3224 - DNA, 60 bp, Artificial Sequence
  Probe
gctttctggcttcacgaacaatttctctctcctcggctcatggggcagtatgaaggcatg

SEQ ID NO: 3225 - DNA, 60 bp, Artificial Sequence
  Probe
gatttggacatgtgggccctgcacattcatacagccttctgtgcttgggactagaagtcc

SEQ ID NO: 3226 - DNA, 60 bp, Artificial Sequence
  Probe
gagctgaggatttctgctgcccgcttcctctcttgtgaccaccactcatacatggagtta

SEQ ID NO: 3227 - DNA, 60 bp, Artificial Sequence
  Probe
tcttgcctggccactcttgcaaatccaactttcggatagagggagggggagagaaaagta

SEQ ID NO: 3228 - DNA, 60 bp, Artificial Sequence
  Probe
gtcaggaactctagcagttgagcccagcaatctgtgttttcgcaaggcttcccagtgatt

SEQ ID NO: 3229 - DNA, 60 bp, Artificial Sequence
  Probe
cattctatccatccataggtgcctgccttctcacttccctctcttcatgggctcttgcct

SEQ ID NO: 3230 - DNA, 60 bp, Artificial Sequence
  Probe
tgaatggcaccaccatccattcagttgctcagggtataagccttggtgccatcttggatt

SEQ ID NO: 3231 - DNA, 60 bp, Artificial Sequence
  Probe
gtcgtgatacagcccagattcacaggtgggggtgactgtactacacaagggcaaggatac

SEQ ID NO: 3232 - DNA, 60 bp, Artificial Sequence
  Probe
agtggaagcagcagtggtgatctgtagtggtgtctacagtgtgctggttctggttgagtt

SEQ ID NO: 3233 - DNA, 60 bp, Artificial Sequence
  Probe
aagtctgttgtttgctgtccctactcctcatgtgttcttggccagctgtgggtttggaag

SEQ ID NO: 3234 - DNA, 60 bp, Artificial Sequence
  Probe
gttggatccgtggatatgctaggagcggagaagaggatttttcagggctgaggatgggag

SEQ ID NO: 3235 - DNA, 60 bp, Artificial Sequence
  Probe
tattggctaacaccgcaactctcaaagaccctcgcaagagaatcacctttgcgcttgctc

SEQ ID NO: 3236 - DNA, 60 bp, Artificial Sequence
  Probe
cttcaggggactgctcctatttttgttgctccttaaagccttactgtggttccccagggc

SEQ ID NO: 3237 - DNA, 60 bp, Artificial Sequence
  Probe
tcatggtccttgaaaggtagagtgtctcacccaaggtcgcacagctggtagattgcaagt

SEQ ID NO: 3238 - DNA, 60 bp, Artificial Sequence
  Probe
cgggatcaaagtgggtctacaccagtgctgcttcctgaatgtttgtgtgtgaacccttgt

SEQ ID NO: 3239 - DNA, 60 bp, Artificial Sequence
  Probe
ttccccaccccagagcacaaggtttaaagactagaacgtggactcttttcaccctcagct

SEQ ID NO: 3240 - DNA, 60 bp, Artificial Sequence
  Probe
aggtccgcccctctgtctctgcaccacctgtttgcataaacacactttgctacaatcttg

SEQ ID NO: 3241 - DNA, 60 bp, Artificial Sequence
  Probe
cacaccaaacaaggaggagcacgggaaaagaaagaagaaaggcaaggggctagggaagaa

SEQ ID NO: 3242 - DNA, 60 bp, Artificial Sequence
  Probe
gtgttgtgtgtatgtcctgtgccttttctcactattgtttgggtgtgggagggggtggtt

SEQ ID NO: 3243 - DNA, 60 bp, Artificial Sequence
  Probe
ccaggctccatccattgataggagccttgctctattgttctacagggcctttgcacatgc

SEQ ID NO: 3244 - DNA, 60 bp, Artificial Sequence
  Probe
cagcatttcctcacccgtttcacatgagcagatttgacacgttgctctgtccccagactt

SEQ ID NO: 3245 - DNA, 60 bp, Artificial Sequence
  Probe
attccctgccctacaacccagtgggccctcttttgacccttgcatttgtggtatcattag

SEQ ID NO: 3246 - DNA, 60 bp, Artificial Sequence
  Probe
cttctcaggatgccaccgggggtcattagattcatgggttctgatgcagactgcaaaacc

SEQ ID NO: 3247 - DNA, 60 bp, Artificial Sequence
  Probe
agggccttgcaaggtcctggtcatatctattctcactgccatttgtctgtccgtcttcca

SEQ ID NO: 3248 - DNA, 60 bp, Artificial Sequence
  Probe
ggcccaagcactgaaaatggaacctggcgaaagcagaggaggagaatgaagaaagatgga

SEQ ID NO: 3249 - DNA, 60 bp, Artificial Sequence
  Probe
gctgtggtggtcattataagcatggtcctcctgggaagaagcatccaggcaagcagaaaa

SEQ ID NO: 3250 - DNA, 60 bp, Artificial Sequence
  Probe
gtcgtagggagggttgtaaactggttgaggtcagttctcattgggtaagcatccctccgg

SEQ ID NO: 3251 - DNA, 60 bp, Artificial Sequence
  Probe
ctggctgccagaaacatcttggtgaatcaaaacctgtgctgcaaggtgtctgactttggc

SEQ ID NO: 3252 - DNA, 60 bp, Artificial Sequence
  Probe
gaggagtgcaaattcaacaaggtggaggcctgcgtgttggatgaacttgacatggagcta

SEQ ID NO: 3253 - DNA, 60 bp, Artificial Sequence
  Probe
gtccagaaaattgtgtctgggggccacactgtagagctgccttatgaattccttctgccc

SEQ ID NO: 3254 - DNA, 60 bp, Artificial Sequence
  Probe
ttgtgcgcaaacacccagctgtcaaagagaaggggagtacgctagacttgtctgacctag

SEQ ID NO: 3255 - DNA, 60 bp, Artificial Sequence
  Probe
gattggtggtgtgaaaaccttggcatgtggaaagcctccatcaccagtggagaggttaca

SEQ ID NO: 3256 - DNA, 60 bp, Artificial Sequence
  Probe
ttgggaggctgttaggaggattacagtcaggaagcatcaatagcactgtgggtactgggc

SEQ ID NO: 3257 - DNA, 60 bp, Artificial Sequence
  Probe
acctacagatcacagggaagcaggaagatctaacggcttctctgtcccccttacaggtca

SEQ ID NO: 3258 - DNA, 60 bp, Artificial Sequence
  Probe
atcatttggggatcttggtaagatgtgtgccctccttccatagctctgggacaggtcctg

SEQ ID NO: 3259 - DNA, 60 bp, Artificial Sequence
  Probe
aataagaaatgccagcatccaccagaagccagaagcggcaaggaatggattctctcctgg

SEQ ID NO: 3260 - DNA, 60 bp, Artificial Sequence
  Probe
ttctgccccagctttgcaggatgaaaagctttccctcctggctgttattcttccacaaga

SEQ ID NO: 3261 - DNA, 60 bp, Artificial Sequence
  Probe
ctctgtacagtgggaataacagcagctcccaccccacagggtgagaacgaagcatagaaa

SEQ ID NO: 3262 - DNA, 60 bp, Artificial Sequence
  Probe
agagtgttcacatgactgaacctaggggaggccagttgtgacttgtggctgtcagaagtc

SEQ ID NO: 3263 - DNA, 60 bp, Artificial Sequence
  Probe
gttgagtgttagatgcagagaagagacaccccccacctccccgcatcacttacaggaatt

SEQ ID NO: 3264 - DNA, 60 bp, Artificial Sequence
  Probe
acaaagaagagggagatgacaaatgggtagggctggggaaggggaatcatagcttggtga

SEQ ID NO: 3265 - DNA, 60 bp, Artificial Sequence
  Probe
gagagtgattggaggtctccttgccttggctgctgtgttccagatcatctccctggtaat

SEQ ID NO: 3266 - DNA, 60 bp, Artificial Sequence
  Probe
gcatctttagatggatggtcctcagtccagtccttccattttacaggcgaggaggcggaa

SEQ ID NO: 3267 - DNA, 60 bp, Artificial Sequence
  Probe
cttgctcgcacagctgttggcaggagctgtcatggataatttgcatgcccaattctttgt

SEQ ID NO: 3268 - DNA, 60 bp, Artificial Sequence
  Probe
gtcctctaggaccgtgtgtgatttcactgcacagatggactctgactttgtggcatccct

SEQ ID NO: 3269 - DNA, 60 bp, Artificial Sequence
  Probe
taagagtgcaggcttcccgcattcaaaatcggttgcttactagctgtgtggctttgagca

SEQ ID NO: 3270 - DNA, 60 bp, Artificial Sequence
  Probe
ctcatcttcctcctctcagttcccttctggtcctttctggccaggtctctgtcttcctct

SEQ ID NO: 3271 - DNA, 60 bp, Artificial Sequence
  Probe
atgggtgtttggaagggaagggaaaaggaaagggggacatactagggagtagcatgggaa

SEQ ID NO: 3272 - DNA, 60 bp, Artificial Sequence
  Probe
tgctttgatcttgaggcagccccctgtcaacttgtagtgaattgtgccctggttcttcag

SEQ ID NO: 3273 - DNA, 60 bp, Artificial Sequence
  Probe
aggccattccctatgctctggagacctaccccttcactcttgcaaatgcttctacccttc

SEQ ID NO: 3274 - DNA, 60 bp, Artificial Sequence
  Probe
tgtaagcttctgctggggataggaattctggtgctcctgatcatcgtgattctgggggtg

SEQ ID NO: 3275 - DNA, 60 bp, Artificial Sequence
  Probe
gaaaacagttggcctgtaatcacagaaccagccacccttcggcgtctacatgcattgtct

SEQ ID NO: 3276 - DNA, 60 bp, Artificial Sequence
  Probe
tggagaaaaacttcatgatgcagaaatgtgctattgcctggctggggagggcagacatca

SEQ ID NO: 3277 - DNA, 60 bp, Artificial Sequence
  Probe
ggagtgaaaatgagggctgtgtacttgaggctgggattggggaaggtagtgatgaggaca

SEQ ID NO: 3278 - DNA, 60 bp, Artificial Sequence
  Probe
ttcttgtccctctgtctgtctgtctatctacttgtctgtctgggccactcctgcctgtgt

SEQ ID NO: 3279 - DNA, 60 bp, Artificial Sequence
  Probe
atgcacattacaggcatggtaaaaagaggctctgggaagcatgttcgagctgctctgctc

SEQ ID NO: 3280 - DNA, 60 bp, Artificial Sequence
  Probe
ttccagcatacggcattccttttctctcttcacaccatgcttctcagaaaggccttggcc

SEQ ID NO: 3281 - DNA, 60 bp, Artificial Sequence
  Probe
tgtaaagtagcgtgcatacagggatggaagggaatgtggatgccattgtgccagcaagtt

SEQ ID NO: 3282 - DNA, 60 bp, Artificial Sequence
  Probe
ccctcctagctgagtaacctcagtccaggacctttgcttcacctcaaaaggaagccactt

SEQ ID NO: 3283 - DNA, 60 bp, Artificial Sequence
  Probe
ggccactttctcttatcctacccaccagcctggccctcctttctacagctggttcttaat

SEQ ID NO: 3284 - DNA, 60 bp, Artificial Sequence
  Probe
agcaactctgagcagtagcctcttccccatttagcgacaatctaggatttcttggggcca

SEQ ID NO: 3285 - DNA, 60 bp, Artificial Sequence
  Probe
tggtgatcagtcaacccagccttactttcctggagtgttcatagtctgcagagcaccagg

SEQ ID NO: 3286 - DNA, 60 bp, Artificial Sequence
  Probe
ctgtgcacgctgttttgggtgaggcaatattctatggaggtgagccaaaggctcactcaa

SEQ ID NO: 3287 - DNA, 60 bp, Artificial Sequence
  Probe
ggcgtgagccactgcgcccggccacattcagttcttatcaaagaaataacccagacttaa

SEQ ID NO: 3288 - DNA, 60 bp, Artificial Sequence
  Probe
ggaaaccagaaagatcatgcgagctctgctggaggtgatctgcaccttgcacaaactcaa

SEQ ID NO: 3289 - DNA, 60 bp, Artificial Sequence
  Probe
gcaagcactgcctatggactggctagtgctgttgggtgcccaagtgtaaaaaggagtatt

SEQ ID NO: 3290 - DNA, 60 bp, Artificial Sequence
  Probe
taggattgcacagtgagtgacaagccatgatgctgctgtctcctctctggacccatcatt

SEQ ID NO: 3291 - DNA, 60 bp, Artificial Sequence
  Probe
gaaataaggtttttgcaaagctccaccacaacacgcagaccttccaagcaggccctcatg

SEQ ID NO: 3292 - DNA, 60 bp, Artificial Sequence
  Probe
gtctacactgtgctgagtctgaaggctgggttctgatcctagttccaccatcaagccacc

SEQ ID NO: 3293 - DNA, 60 bp, Artificial Sequence
  Probe
aggagtcgaggaggagaggaagccatcacgttcacctgacctagttttctgggagaagtt

SEQ ID NO: 3294 - DNA, 60 bp, Artificial Sequence
  Probe
gccctgaatgtgtgaagtaggcggtgaggacagtaagggatggtagggagtaaggcaaag

SEQ ID NO: 3295 - DNA, 60 bp, Artificial Sequence
  Probe
gaaatagtggtagcagaaagccttcagtgaccagcccaacccagtttaaggcgatgcctg

SEQ ID NO: 3296 - DNA, 60 bp, Artificial Sequence
  Probe
atgggcctgtgtggacagcttcacaaaaaaaggagacagtgtccaccattggctccataa

SEQ ID NO: 3297 - DNA, 60 bp, Artificial Sequence
  Probe
ctcagaggattggtttgaccaggcatgtcatttagccctcaagaaaactggccctcccac

SEQ ID NO: 3298 - DNA, 60 bp, Artificial Sequence
  Probe
actgagcagatgggcaactgtggagagaagggtgaaaggatccacctcactcctgatttc

SEQ ID NO: 3299 - DNA, 60 bp, Artificial Sequence
  Probe
ttgtcaagggtgtggtggactcagatgatctccccttgaatgtttcccgcgagactcttc

SEQ ID NO: 3300 - DNA, 60 bp, Artificial Sequence
  Probe
tatgacagacagtccgggagtgcagtcatcacgtttgtggagattggagtggctgacaag

SEQ ID NO: 3301 - DNA, 60 bp, Artificial Sequence
  Probe
caacctcagcaccattgatcttcttggtcagacaactctttgctgtggtgggctgtcctg

SEQ ID NO: 3302 - DNA, 60 bp, Artificial Sequence
  Probe
cagaagccaccctgacagggaactaatgagacattttctacaggggtctgtcccaggtgg

SEQ ID NO: 3303 - DNA, 60 bp, Artificial Sequence
  Probe
ccaaaggccaaggtccaaactgaactcagtgctgagctcatgagctgttcctcaaactcc

SEQ ID NO: 3304 - DNA, 60 bp, Artificial Sequence
  Probe
cattctgctgtaccaagggtctgcggaaaccacctttttgccctttgaattgtgcagcat

SEQ ID NO: 3305 - DNA, 60 bp, Artificial Sequence
  Probe
tgtagcccattttcctgtgaaaggccttgacttggattgaagctgggctcctccaacttc

SEQ ID NO: 3306 - DNA, 60 bp, Artificial Sequence
  Probe
gttctcagatgcgtaaagcagaacagcctcccgaatgaagcgttgccattgaactcacca

SEQ ID NO: 3307 - DNA, 60 bp, Artificial Sequence
  Probe
actggggtagctggcctaccaggtagctcagatggtgattgagtttgctgagaaaccatc

SEQ ID NO: 3308 - DNA, 60 bp, Artificial Sequence
  Probe
agtgggagattgactgccaaagaggaagtaggagaggtgtgagaggttggagtccagtga

SEQ ID NO: 3309 - DNA, 60 bp, Artificial Sequence
  Probe
cttctgggacgactgcatcaagtacaactgcacggtggttcagtacatcggggagatctg

SEQ ID NO: 3310 - DNA, 60 bp, Artificial Sequence
  Probe
aaggagctggggactggacaatttggggtagtgaagtatgggaaatggagaggccagtac

SEQ ID NO: 3311 - DNA, 60 bp, Artificial Sequence
  Probe
atctggggttaatgaacccaggctttgatacagggggttcgattgcaaagattgggaggc

SEQ ID NO: 3312 - DNA, 60 bp, Artificial Sequence
  Probe
agatttcaggagggaatgggccaggccaccgtctacttctggatacacccaccattttat

SEQ ID NO: 3313 - DNA, 60 bp, Artificial Sequence
  Probe
ctccagctttcccccagggatttgcagcctcattttccccatccatagtccattttgcta

SEQ ID NO: 3314 - DNA, 60 bp, Artificial Sequence
  Probe
tggcagacaatgagaagtggccatgctatggctattctgtgagagtagaggcatggggtt

SEQ ID NO: 3315 - DNA, 60 bp, Artificial Sequence
  Probe
cttcctttcccgcccttctatttcctgcctttggctgtttgtggttggaaggagaggaaa

SEQ ID NO: 3316 - DNA, 60 bp, Artificial Sequence
  Probe
tgagctatgaatgcccctctctgagcctcttccttcctgcaccatgtggataaacaagct

SEQ ID NO: 3317 - DNA, 60 bp, Artificial Sequence
  Probe
agctcccgctttaactctggggaaagggcttcccagtgagttgcgaccttcaatatgata

SEQ ID NO: 3318 - DNA, 60 bp, Artificial Sequence
  Probe
cgcagaacctctttcctcatctgcaaggtggagataacaacagtacccacctcacaggct

SEQ ID NO: 3319 - DNA, 60 bp, Artificial Sequence
  Probe
agccaggtgactgcatcttgcctaggcacagaagagtagggttggaatgtgacgttgtta

SEQ ID NO: 3320 - DNA, 60 bp, Artificial Sequence
  Probe
ctggacaaggggcagctacgtatccatcgtgatggcatctacatggtacacatccaggtg

SEQ ID NO: 3321 - DNA, 60 bp, Artificial Sequence
  Probe
gctggaaaaacagtgccgattgtgaaaggaggggaggcaacaagaatggaggaaggagaa

SEQ ID NO: 3322 - DNA, 60 bp, Artificial Sequence
  Probe
aactgcactgcctacatgcgtattaaggtccattctgcctgtgtgtgctgtggctttgaa

SEQ ID NO: 3323 - DNA, 60 bp, Artificial Sequence
  Probe
tcagtttccccttttgcataatgcacataagcatcccccctgcttcccaggtcttggatt

SEQ ID NO: 3324 - DNA, 60 bp, Artificial Sequence
  Probe
tttcagagacagcagagcacacaagcttctaggacaagagccaggaagaaaccaccggaa

SEQ ID NO: 3325 - DNA, 60 bp, Artificial Sequence
  Probe
catctggcaagaaatacctccgctacacaccccagccttaagtctcttggagaagctggt

SEQ ID NO: 3326 - DNA, 60 bp, Artificial Sequence
  Probe
tagaccaggctgccaggaaaagaaaagagcagagagaagtcattggtgacatcccaccca

SEQ ID NO: 3327 - DNA, 60 bp, Artificial Sequence
  Probe
caagagcccaagagccccatgatactgttgtccccactgtacagatgagcaatcagaggt

SEQ ID NO: 3328 - DNA, 60 bp, Artificial Sequence
  Probe
ttttgagtatccaggagggctggggactttggagtagttggtgattccctctgccacatt

SEQ ID NO: 3329 - DNA, 60 bp, Artificial Sequence
  Probe
cggtgtgttcacccccgacttccaggagtttgtcaataaatgcctcatcaagaacccagc

SEQ ID NO: 3330 - DNA, 60 bp, Artificial Sequence
  Probe
tgtggctcttgtgcaatgaacatcaatggaggcaacactctagcttgcacccgaaggatt

SEQ ID NO: 3331 - DNA, 60 bp, Artificial Sequence
  Probe
tgcccaaccctgtgatcagaacctccaaatactgccatgagaaactagagggcaggtctt

SEQ ID NO: 3332 - DNA, 60 bp, Artificial Sequence
  Probe
ttgcctgcaagaaacgaaactcaaccgaaagcctgcagagagcagaacatggaaggagac

SEQ ID NO: 3333 - DNA, 60 bp, Artificial Sequence
  Probe
agcagcatgtgagaagaacctggaggcaggaaggagcttagtgatttctgggtttgagga

SEQ ID NO: 3334 - DNA, 60 bp, Artificial Sequence
  Probe
ccgtctccctgtctctgtctcagtctgtccttcactctgtgtgtgtgtgtgtgtgtctct

SEQ ID NO: 3335 - DNA, 60 bp, Artificial Sequence
  Probe
acttcttcctgtgcatgctatccatctctgagacctgctacactgtggccatcattcccc

SEQ ID NO: 3336 - DNA, 60 bp, Artificial Sequence
  Probe
catctcttaactcagcacctctgacatttccagagccatgagggtatgtgcccccaggag

SEQ ID NO: 3337 - DNA, 60 bp, Artificial Sequence
  Probe
catcagactattcccaggagggggtaggaatcctgggtttgagtcccagctcagacacta

SEQ ID NO: 3338 - DNA, 60 bp, Artificial Sequence
  Probe
ggttcagcatgggcagttcccccattttagtggggtctgggatttgcttcttagatccac

SEQ ID NO: 3339 - DNA, 60 bp, Artificial Sequence
  Probe
gcttgctcattctagaggcagctgctcccaactctggactgctctgacttagaaagtgct

SEQ ID NO: 3340 - DNA, 60 bp, Artificial Sequence
  Probe
ttggcccttgagtccagtcaccctgtctgagttcattcagcatgttcacttgtgtttgcc

SEQ ID NO: 3341 - DNA, 60 bp, Artificial Sequence
  Probe
tcagtggcttggtggggactctttcttattggttgcttctaggaactccacccagcttca

SEQ ID NO: 3342 - DNA, 60 bp, Artificial Sequence
  Probe
gagtcttctgcccaattcctctcactcctggttgtctacacagcccctgcatgatgttct

SEQ ID NO: 3343 - DNA, 60 bp, Artificial Sequence
  Probe
taaatctggcaaccctagtctgctagccaggatccacaagtccttgttccactgtgcctt

SEQ ID NO: 3344 - DNA, 60 bp, Artificial Sequence
  Probe
gctccacttctatggtggtcactcacatgactgagaagttggtgctagctgttggcagga

SEQ ID NO: 3345 - DNA, 60 bp, Artificial Sequence
  Probe
ctgtgcccttgccccttgctcttatcttggtccgtgtatctgggagttcttccaccttat

SEQ ID NO: 3346 - DNA, 60 bp, Artificial Sequence
  Probe
gttccgcaagccctgaaagcgcaagtcctcaaagcacagttacagtattccagcagactc

SEQ ID NO: 3347 - DNA, 60 bp, Artificial Sequence
  Probe
ctaacccggccattggaagcataacccagcttgtaagagcaagtgtggttcagcctcaaa

SEQ ID NO: 3348 - DNA, 60 bp, Artificial Sequence
  Probe
caggtcacattgttcctgagggaggaatcctgcagattggccaagaaaagaatggctgct

SEQ ID NO: 3349 - DNA, 60 bp, Artificial Sequence
  Probe
aggccttatctccatccagctagatcagtggagcccagcatttatggtgcctgattcctg

SEQ ID NO: 3350 - DNA, 60 bp, Artificial Sequence
  Probe
ccctattcctggtgcatttatgcccagagaggtggcattatttcctggggtggcattcag

SEQ ID NO: 3351 - DNA, 60 bp, Artificial Sequence
  Probe
agatcgaaatctcctctctgtggcctacaagaatgtggttggtgccaggcgatcttcctg

SEQ ID NO: 3352 - DNA, 60 bp, Artificial Sequence
  Probe
cacagaactcccgttgtgtggcaatgctcagtgggagtaaggagataaggctggacagat

SEQ ID NO: 3353 - DNA, 60 bp, Artificial Sequence
  Probe
gccaccagcctccatctggattcccctttcttttactggggactggaaattccaagcaat

SEQ ID NO: 3354 - DNA, 60 bp, Artificial Sequence
  Probe
attctatgctgggtacttgctaaactcgggaccaagcacgactcaactgctctggctgag

SEQ ID NO: 3355 - DNA, 60 bp, Artificial Sequence
  Probe
ggccaccccatgcaaatgattggtcttctctctgtttccaacctgcaccacaggtatcat

SEQ ID NO: 3356 - DNA, 60 bp, Artificial Sequence
  Probe
gaaatatagcccagtgggcaacttgaaagggagatggcagcagtgggctgatgaacacat

SEQ ID NO: 3357 - DNA, 60 bp, Artificial Sequence
  Probe
aactccccaacccacctctcttccctccggactctaaacaggaacttgaatactgggaga

SEQ ID NO: 3358 - DNA, 60 bp, Artificial Sequence
  Probe
cgactctgaaaatcgaaccaacctttcctgtgaagggtgcctctcaccgtcgtgtctctc

SEQ ID NO: 3359 - DNA, 60 bp, Artificial Sequence
  Probe
agtaccccgacctcagcaaacataacaaccacatggccaaggtactgacccttgaactct

SEQ ID NO: 3360 - DNA, 60 bp, Artificial Sequence
  Probe
ctcccctttactctctgagtctcactctcgcattcttccctcactcccccagttcagtcc

SEQ ID NO: 3361 - DNA, 60 bp, Artificial Sequence
  Probe
aatggatttggagagaggggtcaactctcactcccccagtccactgttttggacacaaca

SEQ ID NO: 3362 - DNA, 60 bp, Artificial Sequence
  Probe
gctcttggactccagacactgacttcaacttaccactttccgccccgattagaaaggcct

SEQ ID NO: 3363 - DNA, 60 bp, Artificial Sequence
  Probe
gttccctgaggtgccaggcaggcaactttagcacatgatgaaaacagacttccacctcag

SEQ ID NO: 3364 - DNA, 60 bp, Artificial Sequence
  Probe
ctcatcctggtcactgcttctgctataacagccctaggccaggaatatgaacaagccgct

SEQ ID NO: 3365 - DNA, 60 bp, Artificial Sequence
  Probe
ctccaagcattaggtaaacccaccaagcaatcctagcctgtgatggcgtttgacgtcagc

SEQ ID NO: 3366 - DNA, 60 bp, Artificial Sequence
  Probe
gtggaacaatgataatccccttttcaagagcgccaccacgacggtcatgaaccccaagtt

SEQ ID NO: 3367 - DNA, 60 bp, Artificial Sequence
  Probe
ctcacccctctggcctctacagccctcagaggagagaaaaccaattctccaacaaacagg

SEQ ID NO: 3368 - DNA, 60 bp, Artificial Sequence
  Probe
actccaggaataagacaaaaggagaggaggaggccatcacctctggcctcttccatcgta

SEQ ID NO: 3369 - DNA, 60 bp, Artificial Sequence
  Probe
gtgtcataccatcactggagagcagccctctgggtgtacaggattggggaaatccatcag

SEQ ID NO: 3370 - DNA, 60 bp, Artificial Sequence
  Probe
ttgaatgcccagtgaaacagaaacggtgcagggcaagtaaggagtcggttggttgtgtac

SEQ ID NO: 3371 - DNA, 60 bp, Artificial Sequence
  Probe
ggtatgttgttcactctccagctcactctaggtctcccaggagctctgtcccttggatgt

SEQ ID NO: 3372 - DNA, 60 bp, Artificial Sequence
  Probe
gccagccttctctggtcttcctttttggtggacttcatttcttaggtgctggtgcccttc

SEQ ID NO: 3373 - DNA, 60 bp, Artificial Sequence
  Probe
taactatgggttggcaacatgttcctggatgtgtttgctggcacagtgacaggtgctagc

SEQ ID NO: 3374 - DNA, 60 bp, Artificial Sequence
  Probe
ctccttccaagccaaaagaagcctctgggaaggtgtgccaatggtgaaaacgtacagagg

SEQ ID NO: 3375 - DNA, 60 bp, Artificial Sequence
  Probe
gggccatgaagaatgaatggagtgatggcagcattgagggagaaagatcagcaggagcac

SEQ ID NO: 3376 - DNA, 60 bp, Artificial Sequence
  Probe
ttcaaggcttccccatgttcaaaagaggacgctgtctttgcataggccctggggtaaaag

SEQ ID NO: 3377 - DNA, 60 bp, Artificial Sequence
  Probe
cctatttcctgatttcttctgggctggacttccccgttctccaccagcagctccagtatc

SEQ ID NO: 3378 - DNA, 60 bp, Artificial Sequence
  Probe
gtgataatacagaaaggtggggctggtgtaggggtgaagtcaggatgctttgggagagca

SEQ ID NO: 3379 - DNA, 60 bp, Artificial Sequence
  Probe
cgagtgctagctgactgagccaaaaattgagcccaggtctccctttgtaccccctcttat

SEQ ID NO: 3380 - DNA, 60 bp, Artificial Sequence
  Probe
ctgggcatggttacggtgctctgatcaacatctttccatgcacaagattggggctgagtt

SEQ ID NO: 3381 - DNA, 60 bp, Artificial Sequence
  Probe
gattccccactcccctgagtttcacttcttctcccaacttgtgtcgggtccttcttccag

SEQ ID NO: 3382 - DNA, 60 bp, Artificial Sequence
  Probe
gtttgaagtttctgctttgaactccgtccagcctgatccctggcctgagcaacttcacaa

SEQ ID NO: 3383 - DNA, 60 bp, Artificial Sequence
  Probe
agacctttggctgccagaatctagaaccatggctgaccaaagcgagacttccgagtaagg

SEQ ID NO: 3384 - DNA, 60 bp, Artificial Sequence
  Probe
aactgccatgtcctctgaagaaggaaagctcttcgtgggagggctcaactttaacaccga

SEQ ID NO: 3385 - DNA, 60 bp, Artificial Sequence
  Probe
atggccactgctttgcagaaaatggtccatctcaaaagtccagcttgccccctcttctta

SEQ ID NO: 3386 - DNA, 60 bp, Artificial Sequence
  Probe
tgccatagctggcagaaacacagaagcactaccaaaatccacatgctggtcactgtgagc

SEQ ID NO: 3387 - DNA, 60 bp, Artificial Sequence
  Probe
atggtgcgtttttgcctggttcttgaactcggagaagagagactaggcttctcctgctcc

SEQ ID NO: 3388 - DNA, 60 bp, Artificial Sequence
  Probe
tcccacacattgatgaaacctacctgatgttctggatcggggtcaccagcgtactgcttc

SEQ ID NO: 3389 - DNA, 60 bp, Artificial Sequence
  Probe
cctctcagcttccttccagttcttgtgttctgtgaccccttttcctcatctctgcctgct

SEQ ID NO: 3390 - DNA, 60 bp, Artificial Sequence
  Probe
accagacatacatgtgtttttggcccaaagcaggggtctttagttggaatgcctcctccc

SEQ ID NO: 3391 - DNA, 60 bp, Artificial Sequence
  Probe
ggcaaacgtacatgcttccaaggccaaggaggaaacacagtatttagccaccgggaactt

SEQ ID NO: 3392 - DNA, 60 bp, Artificial Sequence
  Probe
gcagtacttaatggacagagcactgaagtgggagtgagggcaactgggttctgatcccaa

SEQ ID NO: 3393 - DNA, 60 bp, Artificial Sequence
  Probe
cccttgcctttgaaaaacgcttcattctctgctagctaggcattctgggatgggtgggtc

SEQ ID NO: 3394 - DNA, 60 bp, Artificial Sequence
  Probe
agaactttgcctgtactgtagctcaagccacgctaaagccaaaccgttgccaaccaagaa

SEQ ID NO: 3395 - DNA, 60 bp, Artificial Sequence
  Probe
gcgtcagcagcttgcaaagctcagatctcaacagaggcctgactcaggatgagtatctcc

SEQ ID NO: 3396 - DNA, 60 bp, Artificial Sequence
  Probe
tccctccataggctgttctaaggggagccttggtaccaaagccactagatgggatcctaa

SEQ ID NO: 3397 - DNA, 60 bp, Artificial Sequence
  Probe
cctaacggaaagcacagaaaacaaaaccaccaactctgtgttcgccgaggaaggcaggaa

SEQ ID NO: 3398 - DNA, 60 bp, Artificial Sequence
  Probe
gggctgcagagatgtccccctcaacactgtagaagagaggagaacttgggaagtagacct

SEQ ID NO: 3399 - DNA, 60 bp, Artificial Sequence
  Probe
ccatcggcttccctgggtcttaggtttttgggctggattaagtcctgcttccagcatttc

SEQ ID NO: 3400 - DNA, 60 bp, Artificial Sequence
  Probe
ctatgttccccatgctgctgtcaggaatggctggattaccaaatctgttgggcatgggag

SEQ ID NO: 3401 - DNA, 60 bp, Artificial Sequence
  Probe
gagtgtggtttcggccaatctgttacctcagtgttgccatcttcattgccaaagcctcct

SEQ ID NO: 3402 - DNA, 60 bp, Artificial Sequence
  Probe
gtgaccagtgtgggcaaatgctggaggttctcagatttgaagctaatggacccgtttgct

SEQ ID NO: 3403 - DNA, 60 bp, Artificial Sequence
  Probe
gttactggatcacaagcagccagggacaatgtgcagttgttggtcctgggtctttgacag

SEQ ID NO: 3404 - DNA, 60 bp, Artificial Sequence
  Probe
atggaccacgcgtttggcaggtacagactattaattcttccctccatctggtgagggcag

SEQ ID NO: 3405 - DNA, 60 bp, Artificial Sequence
  Probe
ttcccaggcatgagatgatgatggtctggactaggacactggcagtgaaaatggcaagga

SEQ ID NO: 3406 - DNA, 60 bp, Artificial Sequence
  Probe
cttactaaccacctagccacagggaatccttgcaccttggtgtgctaccagagaagtggg

SEQ ID NO: 3407 - DNA, 60 bp, Artificial Sequence
  Probe
aataccagtgcttgagtatccaatgcagcaatggcgcttgcttccatatctggcagctgt

SEQ ID NO: 3408 - DNA, 60 bp, Artificial Sequence
  Probe
tcgatgaaattgctgccaaacttggcctgcggaaggttggctggatatttacagacctcg

SEQ ID NO: 3409 - DNA, 60 bp, Artificial Sequence
  Probe
gccaagatgaaaggttatccccattggccagctcgagtagacgaagttcctgatggagct

SEQ ID NO: 3410 - DNA, 60 bp, Artificial Sequence
  Probe
ccaattgtctacacaattgtgtttgtggtgggtttgccaagtaacggcatggccctgtgg

SEQ ID NO: 3411 - DNA, 60 bp, Artificial Sequence
  Probe
gacctctcacagccgcagacactagaggagttgaacacagtgctgaagagcaagatgctg

SEQ ID NO: 3412 - DNA, 60 bp, Artificial Sequence
  Probe
ttcccaatttcaggagcacggactcagcacccaatgtggatggaagaggtctcccttatt

SEQ ID NO: 3413 - DNA, 60 bp, Artificial Sequence
  Probe
ctgatgtgcattcctgtgttgcccacttagacagagtccacctgagacttctctgccagg

SEQ ID NO: 3414 - DNA, 60 bp, Artificial Sequence
  Probe
gggagagttatcctggttctggctgtgtcctccccattttggccatcttatgagctcctt

SEQ ID NO: 3415 - DNA, 60 bp, Artificial Sequence
  Probe
tatgtgttgaaggcaggccagggtcatatggagagtggagggtgaggagtgtgacagata

SEQ ID NO: 3416 - DNA, 60 bp, Artificial Sequence
  Probe
accctgaaatgactccagctgagttacagcaaggccacatgtcctaccttcagcactcag

SEQ ID NO: 3417 - DNA, 60 bp, Artificial Sequence
  Probe
cgctcggggtcaccaacagtacccatcaagccaccctgtattccaaatgggaaagaaaac

SEQ ID NO: 3418 - DNA, 60 bp, Artificial Sequence
  Probe
ccagagatgagattcttccactggttcagcaagtggaggaagctgcatcgtgaccaggag

SEQ ID NO: 3419 - DNA, 60 bp, Artificial Sequence
  Probe
tctgtttcttggcacgctggggtaaattaggacagaaggtgacagtcttgggtgtggtca

SEQ ID NO: 3420 - DNA, 60 bp, Artificial Sequence
  Probe
ggcaacatacagtctgcccatctgtcaccaatccttttctactctgcacactcctgggga

SEQ ID NO: 3421 - DNA, 60 bp, Artificial Sequence
  Probe
tctctgggctttataacctcctgggaagaactggaggtctgtcatggagtcccctgagtg

SEQ ID NO: 3422 - DNA, 60 bp, Artificial Sequence
  Probe
tgatacaggccacccatcatccagttgatgacatggtgagtgaccaagatgggtgcatct

SEQ ID NO: 3423 - DNA, 60 bp, Artificial Sequence
  Probe
ataggaagctgggaccagagaaagcaagtggctcacccatggtcacacagttaaggactg

SEQ ID NO: 3424 - DNA, 60 bp, Artificial Sequence
  Probe
gggcaccaaccttctgggctagagaaattgcccaggctttacagaacaagctggaatcag

SEQ ID NO: 3425 - DNA, 60 bp, Artificial Sequence
  Probe
gcatcactactctctgctggcttccttgaggaactatgctaccctccctctctccagacc

SEQ ID NO: 3426 - DNA, 60 bp, Artificial Sequence
  Probe
tgcttttcattccactcttttcctgtccttaagtgggacaagatcactgggggggggcta

SEQ ID NO: 3427 - DNA, 60 bp, Artificial Sequence
  Probe
gaatgtcgagagggggtgaagacatttctcaacttctcggccggagtttggctgagatcg

SEQ ID NO: 3428 - DNA, 60 bp, Artificial Sequence
  Probe
cctgcctgaagccatgacccgcttctcctatgcagagtacttttccctctttcactcctg

SEQ ID NO: 3429 - DNA, 60 bp, Artificial Sequence
  Probe
cttagcagatggctgcagagcttcgttgatggtcttttctgtactggaggcctcctgagg

SEQ ID NO: 3430 - DNA, 60 bp, Artificial Sequence
  Probe
cagctgtgattagtcagctgcaggttttaaggggttctgctgtcctgtgggcttttggtt

SEQ ID NO: 3431 - DNA, 60 bp, Artificial Sequence
  Probe
gaaattgggcctcaggctacagctgatgcttagttgttctgaatccccgctcctagagct

SEQ ID NO: 3432 - DNA, 60 bp, Artificial Sequence
  Probe
tcagtatgagctgcttcctgtccctctacctctcactgtcttctctctctctgcgggtct

SEQ ID NO: 3433 - DNA, 60 bp, Artificial Sequence
  Probe
ctgaggccttgaaggctgttatcagaaaattgtgggcggaaacttccaggggtttgctct

SEQ ID NO: 3434 - DNA, 60 bp, Artificial Sequence
  Probe
aggaggggcaaaattgctcccctcaattgagaatctagacagaggagggagtcatgctgc

SEQ ID NO: 3435 - DNA, 60 bp, Artificial Sequence
  Probe
tggaccacgaagggaaagcagaggtaaggtcagagtctccccaaagtggtctatcctgag

SEQ ID NO: 3436 - DNA, 60 bp, Artificial Sequence
  Probe
cttgtggctactctgcagtcactgggagcaactggactctccggattgaccaagttcatc

SEQ ID NO: 3437 - DNA, 60 bp, Artificial Sequence
  Probe
ttggccctcacctcacaagacatcgctgaagtcacacagaccctcttaaacttggctgaa

SEQ ID NO: 3438 - DNA, 60 bp, Artificial Sequence
  Probe
gagaagaaccaggatcgcagtgctctcaaagacacgtacatgttgtccagcaccgtctcc

SEQ ID NO: 3439 - DNA, 60 bp, Artificial Sequence
  Probe
ggccccaggagatctgatcacacttcctcctgaggcacctctcatggatgttgcaataag

SEQ ID NO: 3440 - DNA, 60 bp, Artificial Sequence
  Probe
tctcctagcctgctttgtgcaaacaagtcccaagcaggagaagatgaaggtgagtgagct

SEQ ID NO: 3441 - DNA, 60 bp, Artificial Sequence
  Probe
cagacaggaagggatctcaactgctaccctctgcatgagtttgccttcttgggctcagag

SEQ ID NO: 3442 - DNA, 60 bp, Artificial Sequence
  Probe
atgagaaagggtgaggtgggggccctaagtttctgctcttccaaggctcctccaatattt

SEQ ID NO: 3443 - DNA, 60 bp, Artificial Sequence
  Probe
gaagagtgaggactgactcaaggtcacacagtgatccgggatcccagaactctggtctcc

SEQ ID NO: 3444 - DNA, 60 bp, Artificial Sequence
  Probe
aagggagggatgatcatcattctcttgtgcagtgtggccgtcacagttctctctgccatc

SEQ ID NO: 3445 - DNA, 60 bp, Artificial Sequence
  Probe
ggccgtttaagcagaaagtgacactcatgctgatggatcaggggtcctctcgacgtcatt

SEQ ID NO: 3446 - DNA, 60 bp, Artificial Sequence
  Probe
gagccaaggtctgtgggctcctagaacttcgaactggcgcaggtggtttatctcattctt

SEQ ID NO: 3447 - DNA, 60 bp, Artificial Sequence
  Probe
tgatgtttccttcctgccctccaccctacctgatgaggggccttgctttactttcatctc

SEQ ID NO: 3448 - DNA, 60 bp, Artificial Sequence
  Probe
tggtgggaaatttgttggtagtgtttgccctcaccaacagcaagaagcccaagagtgtca

SEQ ID NO: 3449 - DNA, 60 bp, Artificial Sequence
  Probe
acagatctcatgcaggacaccagcagactcctggacccctatatacgtatccaaggcctg

SEQ ID NO: 3450 - DNA, 60 bp, Artificial Sequence
  Probe
cagtgcctttttgctggacactgtgtccttatggcttcactgcaggtaatgcctttccct

SEQ ID NO: 3451 - DNA, 60 bp, Artificial Sequence
  Probe
tgaatgcatgtgtctgtctgatcagcatcactgcacacggaggtctagtgagcctcttgc

SEQ ID NO: 3452 - DNA, 60 bp, Artificial Sequence
  Probe
ttggtagggcacaaatgagcacctctctggaaggcatcatgctaggcgttagggatatgg

SEQ ID NO: 3453 - DNA, 60 bp, Artificial Sequence
  Probe
aagtatacccctctgctagggcagatgcagcttcatagtccttgttcagcactgcacagc

SEQ ID NO: 3454 - DNA, 60 bp, Artificial Sequence
  Probe
tgggactgaggtgtggacgtacctaacttagaatatgagcaggtgggacgcatctgtggt

SEQ ID NO: 3455 - DNA, 60 bp, Artificial Sequence
  Probe
cttcgaggacctgtaagataccagctgccaaggtctctgttgcccaggaatgtcctgttg

SEQ ID NO: 3456 - DNA, 60 bp, Artificial Sequence
  Probe
gcagcttgatgtgtctgccattggcactgtgcaacaccacgacttttcgtgcaagatttt

SEQ ID NO: 3457 - DNA, 60 bp, Artificial Sequence
  Probe
gtccctgcgccatgtattcaatacgtcgtctttctcctgcgggtctgcaatctcacctac

SEQ ID NO: 3458 - DNA, 60 bp, Artificial Sequence
  Probe
agaacatcctcgggaggctcatttgtggcttctgatgtcccaaatgctcccatacctgat

SEQ ID NO: 3459 - DNA, 60 bp, Artificial Sequence
  Probe
atacttggaatggcccaaggataggcgtaaatgtgggcttttctgggcaaaccttcgagc

SEQ ID NO: 3460 - DNA, 60 bp, Artificial Sequence
  Probe
cacattttcagaagcctctggaaagtcgtgcacagcccaggagtgttgagcaatttcggt

SEQ ID NO: 3461 - DNA, 60 bp, Artificial Sequence
  Probe
tgaagccaggtacgagcaagatgagagtgggttatctctggagtgacagaggctggtctg

SEQ ID NO: 3462 - DNA, 60 bp, Artificial Sequence
  Probe
cgttctgtgacttctgccttaagtttctgttccatggcttccgttgccaaacctgtggct

SEQ ID NO: 3463 - DNA, 60 bp, Artificial Sequence
  Probe
ctttttactcccaccaacgccatgtacctgtgccatttagttgtgttgggctcacctccc

SEQ ID NO: 3464 - DNA, 60 bp, Artificial Sequence
  Probe
atttttgttgcgcctacgaaccaaatgcccccgtcactctctgccattgtttagcagtct

SEQ ID NO: 3465 - DNA, 60 bp, Artificial Sequence
  Probe
ccatcagggtgagggcatctcagacccacatgcaggtttattttaagcttcttggctggc

SEQ ID NO: 3466 - DNA, 60 bp, Artificial Sequence
  Probe
gggagctggaggagaaggctatggaagagctcaaggagatcatacagcaaggaccagact

SEQ ID NO: 3467 - DNA, 60 bp, Artificial Sequence
  Probe
atcccagcctgggctgaatcgaggcctgatcctggatcttcttgacaaactgaagaatcc

SEQ ID NO: 3468 - DNA, 60 bp, Artificial Sequence
  Probe
tcacgtgaaatccttgaactggggccaccgtgtccagcttcaggacagaaaagtcaagta

SEQ ID NO: 3469 - DNA, 60 bp, Artificial Sequence
  Probe
aatcgccgtggtgttgttgaaactgaaaatactacattatgctaatcgcggccgggcccg

SEQ ID NO: 3470 - DNA, 60 bp, Artificial Sequence
  Probe
aaacaccagttactgtcaccagccactaaggagaaactgcaaagagaggctcacgtgcct

SEQ ID NO: 3471 - DNA, 60 bp, Artificial Sequence
  Probe
ctctttccttggcatcacctgctagatctatgtctgtgcaggaggaacagcacaaggcca

SEQ ID NO: 3472 - DNA, 60 bp, Artificial Sequence
  Probe
gtgaagctcttttgcataagggggcttgaggaagctcaacagctgaaagcacaacctgga

SEQ ID NO: 3473 - DNA, 60 bp, Artificial Sequence
  Probe
ccttcagttgtcaagtccaacagctgcactgcaactgtgaaaagcctttctccctgctga

SEQ ID NO: 3474 - DNA, 60 bp, Artificial Sequence
  Probe
cagttgtacaggttgtacactgcaggagagtgcctggcaaaaagatcaaatggggctggg

SEQ ID NO: 3475 - DNA, 60 bp, Artificial Sequence
  Probe
tcttttgtgggcctggtgggagcaactctgacctcagggattgctttctcgtctatcatg

SEQ ID NO: 3476 - DNA, 60 bp, Artificial Sequence
  Probe
tccacctccccttccattagggttctttcttttgggcaccctcatacccttgccatagtt

SEQ ID NO: 3477 - DNA, 60 bp, Artificial Sequence
  Probe
ggaggaaccgaaagcatgagccaagctccctactgtgtcagaaatgtgcgttttggaacc

SEQ ID NO: 3478 - DNA, 60 bp, Artificial Sequence
  Probe
ggaattcactcaccacacctgcagccttcactttcctcacgaaagcctacgagagtggaa

SEQ ID NO: 3479 - DNA, 60 bp, Artificial Sequence
  Probe
ccatggagaccctcatgccatgtttgctgagttcttcggtggcagaaatccctttgacac

SEQ ID NO: 3480 - DNA, 60 bp, Artificial Sequence
  Probe
ggagatgcacagtgagagaaaagagagcatcttagaaacaggaaggcacctggggccaca

SEQ ID NO: 3481 - DNA, 60 bp, Artificial Sequence
  Probe
agggcttttttctgtgtcaattaaagagcctggccagctggacctgggctgtctttttga

SEQ ID NO: 3482 - DNA, 60 bp, Artificial Sequence
  Probe
agaagtgccagccttactgtctgcaacagttctgggaggtagcaatagcgcttcttcagg

SEQ ID NO: 3483 - DNA, 60 bp, Artificial Sequence
  Probe
ctcttcccccacaagtaatctctctaccccatgcagtgtgcacacacacacacacacagt

SEQ ID NO: 3484 - DNA, 60 bp, Artificial Sequence
  Probe
tcaccttcatggtccaggacactctctggaagttctgggtctccccaagaagaggaagac

SEQ ID NO: 3485 - DNA, 60 bp, Artificial Sequence
  Probe
accgaggtttcaatctgcggctgacaaacgggctcatcataatgcactggaacgaaaacg

SEQ ID NO: 3486 - DNA, 60 bp, Artificial Sequence
  Probe
gctgaggggtcagttttatggctgggaggtgcagaattacacagaagtcccagtctgagg

SEQ ID NO: 3487 - DNA, 60 bp, Artificial Sequence
  Probe
tgatcagggccaaagcggtcagtgagaaggaagtggactctggaaacgacatttatggca

SEQ ID NO: 3488 - DNA, 60 bp, Artificial Sequence
  Probe
cccagaagaccttcaggtgactgggcagtcttatcatgggatatttcttctggccctgcc

SEQ ID NO: 3489 - DNA, 60 bp, Artificial Sequence
  Probe
tccagtagacaaagcagcctttgctggcttctgagcaagcctgtaggcaaagaaatgcag

SEQ ID NO: 3490 - DNA, 60 bp, Artificial Sequence
  Probe
atcccacctgcagtcatccctcatcacagcctcacagtttttcgagatctggctccattt

SEQ ID NO: 3491 - DNA, 60 bp, Artificial Sequence
  Probe
ggatcgacggagactgcttcatggtgtcttcagaggcagacacctattacagagccagga

SEQ ID NO: 3492 - DNA, 60 bp, Artificial Sequence
  Probe
ctgcgcatcgtggatctgattaaaggtcagcacttaagcgatgcctttgcccaggtgaac

SEQ ID NO: 3493 - DNA, 60 bp, Artificial Sequence
  Probe
gtgatgctgtggccttctcagtgtctcacatcaagggacgtgggatgtcgttattcccaa

SEQ ID NO: 3494 - DNA, 60 bp, Artificial Sequence
  Probe
aagggtgatggggacgtcttcggggtatttcacacttaggtcctttctggagagagaggg

SEQ ID NO: 3495 - DNA, 60 bp, Artificial Sequence
  Probe
acttacagctgcaggcaggagcatgtcttaatctgcttgggctgccataagtaccacaga

SEQ ID NO: 3496 - DNA, 60 bp, Artificial Sequence
  Probe
gagatgagcagaggaggaaaagagactgggaaagagtgccacatatgtgggcaaggaggc

SEQ ID NO: 3497 - DNA, 60 bp, Artificial Sequence
  Probe
ggatatgtgctcagctttcactattgctgggcctgcctctcactcctctcatgtaagccc

SEQ ID NO: 3498 - DNA, 60 bp, Artificial Sequence
  Probe
aattcgtgacactggtgtcaccattctcctttacagatgggaaatggggcttctggggga

SEQ ID NO: 3499 - DNA, 60 bp, Artificial Sequence
  Probe
cttggctgagcacagagaatgggatgtttcacgggatgtctctgctgcgacagtggatat

SEQ ID NO: 3500 - DNA, 60 bp, Artificial Sequence
  Probe
tccctttgagaaagcatagtccagcaggacagtggccatttggacagaagcccacttagt

SEQ ID NO: 3501 - DNA, 60 bp, Artificial Sequence
  Probe
gccaggcactttgagtctcagtctgatgacccacacttccatgagaagaagcagatcccc

SEQ ID NO: 3502 - DNA, 60 bp, Artificial Sequence
  Probe
cagatgtgtgagccaggaacattcctcgtgaaggactgtgaccagcatagaaaggctgct

SEQ ID NO: 3503 - DNA, 60 bp, Artificial Sequence
  Probe
tttttgagaagaggggaatgtgaggggagggggcagaacagggaggagttgtttgaatga

SEQ ID NO: 3504 - DNA, 60 bp, Artificial Sequence
  Probe
ttcctaagtcctccaggatgaagggagcttgcattttggcaatttggagtctccgggagt

SEQ ID NO: 3505 - DNA, 60 bp, Artificial Sequence
  Probe
cctggtttattttctggtggcctcatggggtggttctaggactggatttcctggtgaggt

SEQ ID NO: 3506 - DNA, 60 bp, Artificial Sequence
  Probe
agactgctcctgagactgagaaaggcagctctgacgggatctcagattttagcagcagga

SEQ ID NO: 3507 - DNA, 60 bp, Artificial Sequence
  Probe
aaggagcaggccgtggagctcttgtctattccttttgtcagagacattgtggaagccctc

SEQ ID NO: 3508 - DNA, 60 bp, Artificial Sequence
  Probe
ctgaccaatttgaatgtgaggatggcagctgcatccatggcagcaggcagtgtaatggta

SEQ ID NO: 3509 - DNA, 60 bp, Artificial Sequence
  Probe
tttgactatgaccccgtgtcaatgtcgcccaatcctgatgctggagaagaagagcttccc

SEQ ID NO: 3510 - DNA, 60 bp, Artificial Sequence
  Probe
ctttttctcctgctccagtgtccgagtgctcagttcagaggaggcaaaggaacaagggaa

SEQ ID NO: 3511 - DNA, 60 bp, Artificial Sequence
  Probe
cactgttagccatgaagttgctgactgcagccacctgaagttgactcaggtacccgatga

SEQ ID NO: 3512 - DNA, 60 bp, Artificial Sequence
  Probe
cgcacagccaagtgatgaagaaggtctatgacaagcccgaggaacctgggagatttcctt

SEQ ID NO: 3513 - DNA, 60 bp, Artificial Sequence
  Probe
gagtcagttaagaccagttccttgctgggaagccctaactctggagggacagagacaggt

SEQ ID NO: 3514 - DNA, 60 bp, Artificial Sequence
  Probe
accagtgaggtaagaaacagctgccccgggacctttcataccacatttgaacagggagag

SEQ ID NO: 3515 - DNA, 60 bp, Artificial Sequence
  Probe
tcccagaatctcccttggagaatgtatggagccagtgtcctcacacccccatccaagata

SEQ ID NO: 3516 - DNA, 60 bp, Artificial Sequence
  Probe
cttccttctcctaggtcctgcgttcaatttcctggatgctcctgctgttcgtgtcactgg

SEQ ID NO: 3517 - DNA, 60 bp, Artificial Sequence
  Probe
tctcaccagaatccaagatttgatcccttgctgccgaaagctctgctggtttctctccca

SEQ ID NO: 3518 - DNA, 60 bp, Artificial Sequence
  Probe
cgctgagtggggcttagcatttcaccaatgaggaaacaggcctcgagaaggcaagaaaac

SEQ ID NO: 3519 - DNA, 60 bp, Artificial Sequence
  Probe
atccagcagttgttgaatcggctgttgtcagtagtccagatcaaatccgcggagaggtgg

SEQ ID NO: 3520 - DNA, 60 bp, Artificial Sequence
  Probe
ggcctgagctagaaggaagcaaaggaaatagaagggcagaagtggagcctgcagagtgag

SEQ ID NO: 3521 - DNA, 60 bp, Artificial Sequence
  Probe
ctgagcttcgctttgtctgtagttttgagctgaagggggagtgtgtgggcgactctcttc

SEQ ID NO: 3522 - DNA, 60 bp, Artificial Sequence
  Probe
gtggctgctttcacaggctggcattgaacacttgcaagcttttctaagcacaaggtgcaa

SEQ ID NO: 3523 - DNA, 60 bp, Artificial Sequence
  Probe
tctgtgaaatggggagccagccttcttgcttgctaaggcctcttccagcaaaacagtttc

SEQ ID NO: 3524 - DNA, 60 bp, Artificial Sequence
  Probe
tgtcacattgaactcttccctcagcgaaagcatttgcattgcttccccaagtcactgcca

SEQ ID NO: 3525 - DNA, 60 bp, Artificial Sequence
  Probe
ctgatgctagctcgtgtcaccaggaagatgctacgtcatgccaagtgttttcagcgccta

SEQ ID NO: 3526 - DNA, 60 bp, Artificial Sequence
  Probe
tcagcctctgtctccttccatccctgtccctgtctggccttaactcttccctctttttct

SEQ ID NO: 3527 - DNA, 60 bp, Artificial Sequence
  Probe
ttcatggtgcctcatcccttgggacctgtgttgccactgagccctattagctcatattcc

SEQ ID NO: 3528 - DNA, 60 bp, Artificial Sequence
  Probe
tgtgtgctcttcccccttttcccatgccctgacaccagtatctcatttggaactgactgt

SEQ ID NO: 3529 - DNA, 60 bp, Artificial Sequence
  Probe
ggagtggtcagaaaactgcaacaaaaggggactgaggccactttagggaattgggggttg

SEQ ID NO: 3530 - DNA, 60 bp, Artificial Sequence
  Probe
gtgtggtaggtgaattggaggagaggactttgaaaccaggcagtctgggctatggcaact

SEQ ID NO: 3531 - DNA, 60 bp, Artificial Sequence
  Probe
attcctcagcttccgccctgccaaagttactggattttcacctgcctgtggcttttcttc

SEQ ID NO: 3532 - DNA, 60 bp, Artificial Sequence
  Probe
tgcagttgcagaagcagccgtttaagactggagtttgagtctgagctctgcctctcagtg

SEQ ID NO: 3533 - DNA, 60 bp, Artificial Sequence
  Probe
agccaaacctaccagcagcaatatggacggagccttgaagatgacattcgctctgacaca

SEQ ID NO: 3534 - DNA, 60 bp, Artificial Sequence
  Probe
tttgaaaacatgggcgcttacactgttgctgctgcctctacgttcaatggcttccagagg

SEQ ID NO: 3535 - DNA, 60 bp, Artificial Sequence
  Probe
ttgttctgtgcaaggccatttatgcaaagcaacccctcaagtggcagaggagctgagaaa

SEQ ID NO: 3536 - DNA, 60 bp, Artificial Sequence
  Probe
atctcagagagatggaagaatttccccagccctgtggatgctgcattccgtcaaggtcac

SEQ ID NO: 3537 - DNA, 60 bp, Artificial Sequence
  Probe
ggggaggtgttatggtctgtgctgaacacctggtactcttgcacactggttggtccatac

SEQ ID NO: 3538 - DNA, 60 bp, Artificial Sequence
  Probe
agtgcacacctgtatcctaacatttgaggagctgacacaggaggaacacttgcagccagg

SEQ ID NO: 3539 - DNA, 60 bp, Artificial Sequence
  Probe
agcacatcacttttgcatctagttccttggcttaccagccacctggaggctgggaatagt

SEQ ID NO: 3540 - DNA, 60 bp, Artificial Sequence
  Probe
aggatgcccaaattctgaggacaagaacttcccccggactgtgatggtcaacctgaacat

SEQ ID NO: 3541 - DNA, 60 bp, Artificial Sequence
  Probe
aaaggaaatgtggggaagcagatccatgtggctacaggtgccagacccctagaaatgtga

SEQ ID NO: 3542 - DNA, 60 bp, Artificial Sequence
  Probe
agacccagctctctgcagcttaaatagggagggaggtgagcagacaggaatgaataccca

SEQ ID NO: 3543 - DNA, 60 bp, Artificial Sequence
  Probe
gggcataccttgctgggactcaacttggctgagaaatgcacaagatgccaaaggaggaag

SEQ ID NO: 3544 - DNA, 60 bp, Artificial Sequence
  Probe
ccaaagcagtctccactgttgttgtgactacagctccgtctcctaaacaggcacctgagc

SEQ ID NO: 3545 - DNA, 60 bp, Artificial Sequence
  Probe
attggcaggcaacatgaatccagacttctaggctgtcttgcgggctcttttttgccagtc

SEQ ID NO: 3546 - DNA, 60 bp, Artificial Sequence
  Probe
gcacagaccctctcactcatgtgatgtcatctctcctccctgcttctgtctcctacagcc

SEQ ID NO: 3547 - DNA, 60 bp, Artificial Sequence
  Probe
agcatctttatatgcacagtgagcaggtgtgtgtgactcagtgagtggcacggctctgtg

SEQ ID NO: 3548 - DNA, 60 bp, Artificial Sequence
  Probe
gaccccatggactgggtttggtctatgagcagcagtattcactggaagtcaacctggctt

SEQ ID NO: 3549 - DNA, 60 bp, Artificial Sequence
  Probe
gcagtcatgctggatagggaagaaggtgagctggaagaggaacagacaacttggacagcc

SEQ ID NO: 3550 - DNA, 60 bp, Artificial Sequence
  Probe
gtcacctgcctggccctaaggacatttgagacctccctgtgttcttctctttgtcttggg

SEQ ID NO: 3551 - DNA, 60 bp, Artificial Sequence
  Probe
ggggcttttcccacatggacacctggtgaagagtattctaggcagagggtgcattagagc

SEQ ID NO: 3552 - DNA, 60 bp, Artificial Sequence
  Probe
ggctacactacaaaaggcaagaatgcccatgtaaggagcccagcagtctggacagatcct

SEQ ID NO: 3553 - DNA, 60 bp, Artificial Sequence
  Probe
tggctacctgtatgagcgtgaggccatcctggagtacattctgcaccagaagaaggagat

SEQ ID NO: 3554 - DNA, 60 bp, Artificial Sequence
  Probe
attggaggagggagggagggaaggaagctgtgttggttttcacacagggattgatggaat

SEQ ID NO: 3555 - DNA, 60 bp, Artificial Sequence
  Probe
ggccccagcctaaatcccttcctagagcaagtcctcactggcaaccacgtttcagattag

SEQ ID NO: 3556 - DNA, 60 bp, Artificial Sequence
  Probe
agctctgcttcaagttctcttttggaaacagcagccatgttgaatgcccccaccagactg

SEQ ID NO: 3557 - DNA, 60 bp, Artificial Sequence
  Probe
cgctgctttcctcgccaaggacttcaactttctcactttgaacaatcagccaccaccagg

SEQ ID NO: 3558 - DNA, 60 bp, Artificial Sequence
  Probe
actctggagtctgcactcaactggtctgcaaaccgactctcggagacttcaggtgagatg

SEQ ID NO: 3559 - DNA, 60 bp, Artificial Sequence
  Probe
ctgcagctgccccaggactgcatgtatgtccatggcagaagtaggcaagagttctagaag

SEQ ID NO: 3560 - DNA, 60 bp, Artificial Sequence
  Probe
tgtgtaataagcagatgcaaagccctggaccccagacccacagaaacatgcctacctcat

SEQ ID NO: 3561 - DNA, 60 bp, Artificial Sequence
  Probe
aaggaagcacaacgccccaatccgctttgttttacacagtctcactttccctgcaccttt

SEQ ID NO: 3562 - DNA, 60 bp, Artificial Sequence
  Probe
ccctgcagttgatcaagagactgggaaatgggcagtttggggaagtatggatgggtacct

SEQ ID NO: 3563 - DNA, 60 bp, Artificial Sequence
  Probe
ctagtttgcaggggaaagtccttcacagggaagcatctcactggacatgctgggctacaa

SEQ ID NO: 3564 - DNA, 60 bp, Artificial Sequence
  Probe
tgaacaagtggacaagtgtctgggagtggacaagagatctgtgcaccatcaggtgtgtgc

SEQ ID NO: 3565 - DNA, 60 bp, Artificial Sequence
  Probe
cagaatcgggtccactgggcaaaatacatgacttctggcaggctgagggcttaccaacta

SEQ ID NO: 3566 - DNA, 60 bp, Artificial Sequence
  Probe
cgtgaaagtcagacttcaagcacagagccatctccacggaatcaaacctcgctacacggg

SEQ ID NO: 3567 - DNA, 60 bp, Artificial Sequence
  Probe
tcaaagtccccctcctaacgtcttcctttccctgcactaacgccaacctgactgcttttc

SEQ ID NO: 3568 - DNA, 60 bp, Artificial Sequence
  Probe
aagtagcttctgagagggtgaggggtacacagagagggattatgggagaggtctctgcct

SEQ ID NO: 3569 - DNA, 60 bp, Artificial Sequence
  Probe
ggaccctccatgtttgctgggtattagccaagctggtcctgggagaatgcagatactgtc

SEQ ID NO: 3570 - DNA, 60 bp, Artificial Sequence
  Probe
ctgcttggacacttggtgtaatagctgctgccactatgcctcgaaactggtgactctgct

SEQ ID NO: 3571 - DNA, 60 bp, Artificial Sequence
  Probe
tgtatgccacacagaacactagttcgtgagttgctccatgaaccaagggtgccatggtca

SEQ ID NO: 3572 - DNA, 60 bp, Artificial Sequence
  Probe
aacatttggggccggctaatcaattgtgggggctgtcctgtgccttgtaggatgtttaac

SEQ ID NO: 3573 - DNA, 60 bp, Artificial Sequence
  Probe
ccaaacggtgtcaaagggctgccggatttcgcatccttctctgctaagctctaggaatct

SEQ ID NO: 3574 - DNA, 60 bp, Artificial Sequence
  Probe
gctcccttcctaggatctgcccctgcattgtagcttgcttaacggagcacttctcctttt

SEQ ID NO: 3575 - DNA, 60 bp, Artificial Sequence
  Probe
gaggctgttagacgctgtggaggaaaggtggtcaactgtatgcattgctttgctgttggc

SEQ ID NO: 3576 - DNA, 60 bp, Artificial Sequence
  Probe
tgctagtgtgtttagagggctgaggatgtcccaaaggcgaggtgtcttcccagatactgt

SEQ ID NO: 3577 - DNA, 60 bp, Artificial Sequence
  Probe
aggttctgtttacttgtgaccctgagaaggggatgccctatgggggctcttctgagatca

SEQ ID NO: 3578 - DNA, 60 bp, Artificial Sequence
  Probe
actatgggctgattaagcccggttggctgccatgttgttaacgagcaccgatttcctcta

SEQ ID NO: 3579 - DNA, 60 bp, Artificial Sequence
  Probe
cagggtgggggatcaggtgacccatattcggatccagaactcaggggatttctatgacct

SEQ ID NO: 3580 - DNA, 60 bp, Artificial Sequence
  Probe
gttgggcagagatgcactgaactcatctttgtgtatgagggccatgagagaggcctggtt

SEQ ID NO: 3581 - DNA, 60 bp, Artificial Sequence
  Probe
ctgggcagcagtactgacttggggacttccttgcctttggattcctgggtgaatatcaca

SEQ ID NO: 3582 - DNA, 60 bp, Artificial Sequence
  Probe
actgctgacaaaagagggggcttctggtctggttggttatttgtgtttggcctgatgtgc

SEQ ID NO: 3583 - DNA, 60 bp, Artificial Sequence
  Probe
tttccctcatagcaccttcaagcctttccccagtatagctccagggcctgggaaaacaaa

SEQ ID NO: 3584 - DNA, 60 bp, Artificial Sequence
  Probe
cagacagagctacatggagtcttggcagagatgctgctcagacatgcatggaaaccctgg

SEQ ID NO: 3585 - DNA, 60 bp, Artificial Sequence
  Probe
tattctccacatgcgtaagcaagggagtacgcaccacagattgtcaggcaaagcctcagg

SEQ ID NO: 3586 - DNA, 60 bp, Artificial Sequence
  Probe
agtctcttcttgcctcatttgcaccccccggcagctcaaacctacttgtttcaacaatgc

SEQ ID NO: 3587 - DNA, 60 bp, Artificial Sequence
  Probe
acccattttaaaggtgaggaaacaagcccagagaggttaagggaggagttcctgcccacc

SEQ ID NO: 3588 - DNA, 60 bp, Artificial Sequence
  Probe
ccctggagcttctacacataccccttctgtccactggcacatggtgctgttccacaatac

SEQ ID NO: 3589 - DNA, 60 bp, Artificial Sequence
  Probe
attcagttcgtctctccagacagcttcggcgcatccttttgcccctgtatgaggttgatg

SEQ ID NO: 3590 - DNA, 60 bp, Artificial Sequence
  Probe
tgagggaaccaaaccagagacgcgctgaacagagagaatcaggctcaaagcaagtggaag

SEQ ID NO: 3591 - DNA, 60 bp, Artificial Sequence
  Probe
gagaacgaggaaccagcctgtgaggatgcagatgaggatgaggacgactatcacaaccca

SEQ ID NO: 3592 - DNA, 60 bp, Artificial Sequence
  Probe
agggctgggttggtaaagagaaggctatggttgacttcttgcttgtgcttcccactctcc

SEQ ID NO: 3593 - DNA, 60 bp, Artificial Sequence
  Probe
tgtgtgtgtgtgtgtgtgtgtgtgtgtgtgcacatttgtttggggatgggggagaagaag

SEQ ID NO: 3594 - DNA, 60 bp, Artificial Sequence
  Probe
tgatgcctttgtcatctcccacttcttctgtgatgtgagacacctgctgaagctggcctg

SEQ ID NO: 3595 - DNA, 60 bp, Artificial Sequence
  Probe
aacactgaggctgagaaaagctagatcacttgtcagggcctgcagtgatcccaaggttgg

SEQ ID NO: 3596 - DNA, 60 bp, Artificial Sequence
  Probe
tctatgccccaaggccatctgccacactgcctgtagtggtaggagacaactacctagttc

SEQ ID NO: 3597 - DNA, 60 bp, Artificial Sequence
  Probe
caacccaggtgcccccttggtcatgaatgatggactgctctctccttaagggttgagatg

SEQ ID NO: 3598 - DNA, 60 bp, Artificial Sequence
  Probe
ccaggattcacccctattggactaattctgtcaatgcccacttcactgtggccagaggca

SEQ ID NO: 3599 - DNA, 60 bp, Artificial Sequence
  Probe
tcaacctcccaagtaggattacaagcatgcgccgacgatgcccagaatccagaactttgt

SEQ ID NO: 3600 - DNA, 60 bp, Artificial Sequence
  Probe
tgaaaacattgctgccgtggtgttctcctacatagccactctgctctacgtggtccatgc

SEQ ID NO: 3601 - DNA, 60 bp, Artificial Sequence
  Probe
aagctgcagatgtcttcagatgacggtgccagtctccttttcctggattttggaggtgct

SEQ ID NO: 3602 - DNA, 60 bp, Artificial Sequence
  Probe
cgtatacctgctcactcctgacgcttcactcacacacagcacaggatctggtgaggctat

SEQ ID NO: 3603 - DNA, 60 bp, Artificial Sequence
  Probe
tacagcaggaaactgcaccagctagactccattctgggaccatctccaggagtccatgag

SEQ ID NO: 3604 - DNA, 60 bp, Artificial Sequence
  Probe
gtgacacatatagccacggcttcctttgcctggcctgaattacaaggggaacgctactga

SEQ ID NO: 3605 - DNA, 60 bp, Artificial Sequence
  Probe
gatgtggtgacaggtgctctgaaggaggtcaccaggacctgacctctttgaaggatcaga

SEQ ID NO: 3606 - DNA, 60 bp, Artificial Sequence
  Probe
cttccagccactgcaggctctgccccttcacctaacagcataagatagggctaacagttg

SEQ ID NO: 3607 - DNA, 60 bp, Artificial Sequence
  Probe
acattgaattttcaacctggctatcctggagatgtccccagtccatacacccgatggggc

SEQ ID NO: 3608 - DNA, 60 bp, Artificial Sequence
  Probe
tctttttaagctgggacacccatcttctcctgccttccaacactggcactcttggttcca

SEQ ID NO: 3609 - DNA, 60 bp, Artificial Sequence
  Probe
atgccctcaaggttcctcaagggtcagctgtcacagttctccaaagtgagttttcaggca

SEQ ID NO: 3610 - DNA, 60 bp, Artificial Sequence
  Probe
cctctgggaagatggacgagaatgagttcgtcgcggtgaccagtacaaatgctgccaaaa

SEQ ID NO: 3611 - DNA, 60 bp, Artificial Sequence
  Probe
actcatctgaaggcttaaactacactggcagtcaggactccgctgtctaaccacacgggt

SEQ ID NO: 3612 - DNA, 60 bp, Artificial Sequence
  Probe
ggtgcccaagctagaggagggcagagaagaatgccttgcttgctctcagtcatgttactg

SEQ ID NO: 3613 - DNA, 60 bp, Artificial Sequence
  Probe
acaaaagtcggcagaggtgccatgctcagaacccaaggatagagtggggtgaaagaaaca

SEQ ID NO: 3614 - DNA, 60 bp, Artificial Sequence
  Probe
ggccctcaccaatactctgtgaggcacatacacacaggcacaacctccagatgaggaaac

SEQ ID NO: 3615 - DNA, 60 bp, Artificial Sequence
  Probe
cctgggcctctctgtgtttggttccaagcacttcccacctcaaactcccattttcaaacc

SEQ ID NO: 3616 - DNA, 60 bp, Artificial Sequence
  Probe
caagttcgagcacaacggggagaggcgaattatagcgttcagccggcctgtgaaatatga

SEQ ID NO: 3617 - DNA, 60 bp, Artificial Sequence
  Probe
gtgcctgcattccttctgcaaaacctgcatcgtgcgctacctggagaccaacaaatactg

SEQ ID NO: 3618 - DNA, 60 bp, Artificial Sequence
  Probe
gggatgcctgtagttggtgatgtgggaactgggttttgagggatgcctaggagttcatcc

SEQ ID NO: 3619 - DNA, 60 bp, Artificial Sequence
  Probe
cccaatgactacctgctgagctggctcctgttcatcgccttcctcttttccggaatcatc

SEQ ID NO: 3620 - DNA, 60 bp, Artificial Sequence
  Probe
gatgttctcttgaggtgtggggtcacggccatctcaagggagaagagaagaggaaccaga

SEQ ID NO: 3621 - DNA, 60 bp, Artificial Sequence
  Probe
ggggattacccacccactataatggagcgggtagtcaagaccgaggagtgtctgttggac

SEQ ID NO: 3622 - DNA, 60 bp, Artificial Sequence
  Probe
ccctgaagaaactctaggatgcatggtgtgcacagtgaagtcctggcatggtgcagagaa

SEQ ID NO: 3623 - DNA, 60 bp, Artificial Sequence
  Probe
atacaggcagctcattctattctcagccacagcctcagaaaggagggacccagaccagaa

SEQ ID NO: 3624 - DNA, 60 bp, Artificial Sequence
  Probe
gttgatccttaacgagctggtccgaatcagcagcatggagggagagcgtctgagagaaga

SEQ ID NO: 3625 - DNA, 60 bp, Artificial Sequence
  Probe
gcccctggtctatacctggtacttggaggtaggattcaaagccaggcagttctgactcca

SEQ ID NO: 3626 - DNA, 60 bp, Artificial Sequence
  Probe
cccagggcactttggaagaggcagagaactttaggagcatggatgcagctggcaatagta

SEQ ID NO: 3627 - DNA, 60 bp, Artificial Sequence
  Probe
gagtcagacaggtgaaaatggagaattgccactcaccaagggcaggcttcttgagggcta

SEQ ID NO: 3628 - DNA, 60 bp, Artificial Sequence
  Probe
cccattaggggtgctgctttggtctgccattctgacactatgtctggcatagcagaggtc

SEQ ID NO: 3629 - DNA, 60 bp, Artificial Sequence
  Probe
gtgcctatgtgattggaaatccattacccagtggagcaacgcacacaactggtgcatgca

SEQ ID NO: 3630 - DNA, 60 bp, Artificial Sequence
  Probe
tgggctggtatgggactcagaccactcagacttagcagaagatgttatccacagcctggg

SEQ ID NO: 3631 - DNA, 60 bp, Artificial Sequence
  Probe
ggtctcgtgttgagatattgtgtgccacaacccccacagtcttcacctccgtgtgtgatg

SEQ ID NO: 3632 - DNA, 60 bp, Artificial Sequence
  Probe
tgtgtgcagtagcagagaagccccctcctggtgagaagccatctgtgtttcatactctct

SEQ ID NO: 3633 - DNA, 60 bp, Artificial Sequence
  Probe
gcgcgtctttctcatagtgatgttagcagcatccgcaggcaaggagaaacatgcaatgcc

SEQ ID NO: 3634 - DNA, 60 bp, Artificial Sequence
  Probe
tagttcaatccccaagcccctccaaagtgtcttctcctcctagtccagggcccatttact

SEQ ID NO: 3635 - DNA, 60 bp, Artificial Sequence
  Probe
aagtcaggatggagtcagaacaactacagtcatcccccgtggtgtctgcacatcactcca

SEQ ID NO: 3636 - DNA, 60 bp, Artificial Sequence
  Probe
tgtcagggaaaggggaaacctttccaccagaactgcttactgggcatgaagaagagggtg

SEQ ID NO: 3637 - DNA, 60 bp, Artificial Sequence
  Probe
acgagggtttctgtggtggaactattctgagcgagttctacatcctaacggcagcccact

SEQ ID NO: 3638 - DNA, 60 bp, Artificial Sequence
  Probe
gggataacagagaaatgctgcaggcattggccccaaatctcaggcctcctattcccagta

SEQ ID NO: 3639 - DNA, 60 bp, Artificial Sequence
  Probe
gggggaagagaggaagtggggatccagttaacgaggtactgctatggcctaatggaagca

SEQ ID NO: 3640 - DNA, 60 bp, Artificial Sequence
  Probe
cttgtctgaatttgctgccaaggctgccttgtctgctggcaaagtctcacctgaaacagt

SEQ ID NO: 3641 - DNA, 60 bp, Artificial Sequence
  Probe
cttgggctttctgtctcctcaacaagagtgcagcttgctgaatgtcagctgcctgagaga

SEQ ID NO: 3642 - DNA, 60 bp, Artificial Sequence
  Probe
gagcacagacgagagcacctttgatgacatcgtccattcgtttgtgagcctgactgccat

SEQ ID NO: 3643 - DNA, 60 bp, Artificial Sequence
  Probe
gcctcacccctgtggtgggctttttaagaggattttaactggttgtggggagggaagaga

SEQ ID NO: 3644 - DNA, 60 bp, Artificial Sequence
  Probe
tacctgttggtattgtccacaagctctcccgagcgccccatcttgtgccatgttttaagt

SEQ ID NO: 3645 - DNA, 60 bp, Artificial Sequence
  Probe
tcggtgcatggtggtttggctttctgatttgtgcaggagttaacgtgctcactgccattc

SEQ ID NO: 3646 - DNA, 60 bp, Artificial Sequence
  Probe
ccagcaatttccatcacctctcaatgcttcagtttccccatcggcaagatggttgtgggg

SEQ ID NO: 3647 - DNA, 60 bp, Artificial Sequence
  Probe
acatgtggtctcggccccctatttttctctttcggggtcccagacttgtattttgggcat

SEQ ID NO: 3648 - DNA, 60 bp, Artificial Sequence
  Probe
cggaggctttcactgtgtcactccccgacataatgggaaatttgggcctagggaactgac

SEQ ID NO: 3649 - DNA, 60 bp, Artificial Sequence
  Probe
gattggcccatctcaaggagcatccttcgcatatctcacatgcacgtgacactgagcctc

SEQ ID NO: 3650 - DNA, 60 bp, Artificial Sequence
  Probe
gcctgacaacagcctgagaaatccccccgtaacttattatcactttggggttcggcctgt

SEQ ID NO: 3651 - DNA, 60 bp, Artificial Sequence
  Probe
gctgtggtcccactcgtatatggtggtgagaccaaaatggtggaaacagccttaacccca

SEQ ID NO: 3652 - DNA, 60 bp, Artificial Sequence
  Probe
aagctggaggtgccacaggagatcaaggacgtgattgagccaatcaaagacaacgatgct

SEQ ID NO: 3653 - DNA, 60 bp, Artificial Sequence
  Probe
ctccttaagggtgctgttcctcaaggacgcagcaggttcgaccctatttggagggaaaac

SEQ ID NO: 3654 - DNA, 60 bp, Artificial Sequence
  Probe
tccttagccctatgactccctgagccactctccagtttggtggtttcctttgaagagggt

SEQ ID NO: 3655 - DNA, 60 bp, Artificial Sequence
  Probe
gtgctgcaaggagctaaggccttcagtgtccccttccttacccaggtttctcacagaatg

SEQ ID NO: 3656 - DNA, 60 bp, Artificial Sequence
  Probe
aggcctggagtggatttccctctgtacccctttatgggtgagcatggctaaggctactag

SEQ ID NO: 3657 - DNA, 60 bp, Artificial Sequence
  Probe
cctggaggtttctggttggggtggtttgggtttgagaggggactccaggaatcctttaag

SEQ ID NO: 3658 - DNA, 60 bp, Artificial Sequence
  Probe
cagggtttgagagattgtatctccaagggttgcagacccacctgtctacaggggtcagga

SEQ ID NO: 3659 - DNA, 60 bp, Artificial Sequence
  Probe
cgacatcctcgaggccctagcatttctccttggataggggaccagagagagcttggaatg

SEQ ID NO: 3660 - DNA, 60 bp, Artificial Sequence
  Probe
ggctcacaagggattcaagggagtcgatgcccagggcacgctttccaaaatttttaagct

SEQ ID NO: 3661 - DNA, 60 bp, Artificial Sequence
  Probe
aaaggcagtgagtttcgtgaagcctggaagttggccatgtgtcttaagagtggctggact

SEQ ID NO: 3662 - DNA, 60 bp, Artificial Sequence
  Probe
agaattcccgtctcagtggtcaaattctcattcatcgtggcccaggcaagcacacttcct

SEQ ID NO: 3663 - DNA, 60 bp, Artificial Sequence
  Probe
aagcagggtcaggtgcctcctgaggcaagtgtgaatgcaaactccacttactgtttagct

SEQ ID NO: 3664 - DNA, 60 bp, Artificial Sequence
  Probe
agagcctgtgactatggagagaggccacctgaggtagtaccctctgaggaacaggaacaa

SEQ ID NO: 3665 - DNA, 60 bp, Artificial Sequence
  Probe
ggaagaggaccaagaggatgggtttactgtggtgctggggaggggatagtagcagagaac

SEQ ID NO: 3666 - DNA, 60 bp, Artificial Sequence
  Probe
aagacgggttgagaatccctaatttgagggtcagttcctgcagaagtgccctttgcctcc

SEQ ID NO: 3667 - DNA, 60 bp, Artificial Sequence
  Probe
cgcagtggttcagcccgagaacttttcattcataaaaagaaaagactccgcacggcgcgg

SEQ ID NO: 3668 - DNA, 60 bp, Artificial Sequence
  Probe
ctgtgggtggctaattaagatagatcgcgttagccagttttaccagcgcagctaggcgcg

SEQ ID NO: 3669 - DNA, 60 bp, Artificial Sequence
  Probe
caagggcttcttcaagcgcacagtgcagaaaaacgccaagtacatctgcctggctaacaa

SEQ ID NO: 3670 - DNA, 60 bp, Artificial Sequence
  Probe
ccaccaccctgtgaatctgcctgcacagtaccaacagacgtggataagtggttccatcac

SEQ ID NO: 3671 - DNA, 60 bp, Artificial Sequence
  Probe
acacatgtgaagggtggcgtttcagatcatttccagatgagcaggctgggagagatggtg

SEQ ID NO: 3672 - DNA, 60 bp, Artificial Sequence
  Probe
ggtgagacgcgttagcaggtgacatcatggaagatcaagcagggaatgtccggggaaatc

SEQ ID NO: 3673 - DNA, 60 bp, Artificial Sequence
  Probe
tcttctggaggagacctctataacaatcagctgaggctgctgaatgagggggaagggcac

SEQ ID NO: 3674 - DNA, 60 bp, Artificial Sequence
  Probe
cacacatatttggggggcattcacacccatgagggacacctctggggggaaaacaaattg

SEQ ID NO: 3675 - DNA, 60 bp, Artificial Sequence
  Probe
gttggttgactggcaaaaccagaagggcttcctcttgtttggccaatgcttgagctctca

SEQ ID NO: 3676 - DNA, 60 bp, Artificial Sequence
  Probe
gaccactattaaacagcctggtacagacgctggcttgtgccaccgtagacagacctcgta

SEQ ID NO: 3677 - DNA, 60 bp, Artificial Sequence
  Probe
ctgcagctttccgacacgggacagtaccagtgtttggtgtttctgggacatcagaccttc

SEQ ID NO: 3678 - DNA, 60 bp, Artificial Sequence
  Probe
aacagaaagccattgatgtcccaggtcaagtccaggtctatgaactccagcccagcaacc

SEQ ID NO: 3679 - DNA, 60 bp, Artificial Sequence
  Probe
accaactatcttggtaactgcctaactgaccagctgttgcttggggagcccattgagcaa

SEQ ID NO: 3680 - DNA, 60 bp, Artificial Sequence
  Probe
tgtctggcaggaaagatagagtgggctggacggtacaggatcgcgtaaagtgtggacttt

SEQ ID NO: 3681 - DNA, 60 bp, Artificial Sequence
  Probe
ctgcctctccctttgttctctgtgcctctagcctcctatctgctggaggtttgtgctaca

SEQ ID NO: 3682 - DNA, 60 bp, Artificial Sequence
  Probe
gattagctctgtgctgcagccaatccatgttagcccccccaagttaggaagacctggaaa

SEQ ID NO: 3683 - DNA, 60 bp, Artificial Sequence
  Probe
caaatgcatcactaaaaccaaggccttccagggcctaacacagctgcgcaagcttaacct

SEQ ID NO: 3684 - DNA, 60 bp, Artificial Sequence
  Probe
attgccctgcagagtggtttacaagctggtgagctgtcagggagaaatgtcgaaacaggt

SEQ ID NO: 3685 - DNA, 60 bp, Artificial Sequence
  Probe
gcctgatgaccatagtaaccagccttctgttccttggtgtctgtgcccaccacatcatcc

SEQ ID NO: 3686 - DNA, 60 bp, Artificial Sequence
  Probe
cgagctcactccggaacttgtcatctccaacgacaaaaggagcttttgccactgactcgg

SEQ ID NO: 3687 - DNA, 60 bp, Artificial Sequence
  Probe
ccaactctgttcatgacacttccttccagcaccaaatgcttcccacccctctactcccac

SEQ ID NO: 3688 - DNA, 60 bp, Artificial Sequence
  Probe
ctttaacccggtgctctatgtcttcgtgggggtcaagttccgcacacacctgaaacatgt

SEQ ID NO: 3689 - DNA, 60 bp, Artificial Sequence
  Probe
tttgttgtcccactctctgttacctgcattgtgtgacagcaagatccgttccaaggccct

SEQ ID NO: 3690 - DNA, 60 bp, Artificial Sequence
  Probe
gtacttacgtgccattccctttccctgaaatgcccttactctggcttctctgcctggcaa

SEQ ID NO: 3691 - DNA, 60 bp, Artificial Sequence
  Probe
gcagagactcacatggagccagctgctatgcagagctcaaacttcagcagaaacccagag

SEQ ID NO: 3692 - DNA, 60 bp, Artificial Sequence
  Probe
tctcctggtctcccttcttctagaaccccttcctccacctccctctctgcagaacttctc

SEQ ID NO: 3693 - DNA, 60 bp, Artificial Sequence
  Probe
ccctgtggaggtcagctataccaaaagggtacagaaattctggagtgggtccctgggtct

SEQ ID NO: 3694 - DNA, 60 bp, Artificial Sequence
  Probe
ttggggagggagtgttcgctgggaaaccttgagagattccgtgtcttagaatgctggaga

SEQ ID NO: 3695 - DNA, 60 bp, Artificial Sequence
  Probe
tgagcagggatatctacagcaccgactattaccgtgtaagggtcctttgtccccaacgcc

SEQ ID NO: 3696 - DNA, 60 bp, Artificial Sequence
  Probe
tatcgggggccaccttttcatacaggcaggtgtcacagaactgactgtgggacttgagta

SEQ ID NO: 3697 - DNA, 60 bp, Artificial Sequence
  Probe
aggacttacaccagaggatcgataagttccgtttcaccccacctttggaggacagctgct

SEQ ID NO: 3698 - DNA, 60 bp, Artificial Sequence
  Probe
gtgaaggaatcagcatgggagatcatctctgggtggcccgtttcatcttgcatcgtgtgt

SEQ ID NO: 3699 - DNA, 60 bp, Artificial Sequence
  Probe
cactccacccccgtgttctcatctcttcccactcctcctgttatttactctgctccaccc

SEQ ID NO: 3700 - DNA, 60 bp, Artificial Sequence
  Probe
ggaggacagaagccctgtggatccccggatttcacactccttctgttttgttgccgttta

SEQ ID NO: 3701 - DNA, 60 bp, Artificial Sequence
  Probe
gctgaacagcaatcatggaaactgatgtgttgtgtcttagggactgaggggagggggtgg

SEQ ID NO: 3702 - DNA, 60 bp, Artificial Sequence
  Probe
tagcaggtatcaagactcattcctgcttgtggctgagcagtgtcctgtggtgtggctaga

SEQ ID NO: 3703 - DNA, 60 bp, Artificial Sequence
  Probe
tgagtgaagcggtctgcatgaaggaatttgaccatcccaacgtcatgaggctcatcggtg

SEQ ID NO: 3704 - DNA, 60 bp, Artificial Sequence
  Probe
cccgttacttgggaggccaaggcaggcattatcaatcttgaggccaggagttaaagagca

SEQ ID NO: 3705 - DNA, 60 bp, Artificial Sequence
  Probe
caaccaggaggagttgggctgtatttttcaaaggtggggagagtggagcacacaccttga

SEQ ID NO: 3706 - DNA, 60 bp, Artificial Sequence
  Probe
cacatgcatgattgtaggtggaaccagaagaaccacccaggcaactcacagaactgggga

SEQ ID NO: 3707 - DNA, 60 bp, Artificial Sequence
  Probe
ggccctccatctcctactatgtacaatgagagcaagaccatcccccaggaactgcctagc

SEQ ID NO: 3708 - DNA, 60 bp, Artificial Sequence
  Probe
tcatgttcatcggaggccccaacaccaggaaggactatcacatcgaagagggtgaagagg

SEQ ID NO: 3709 - DNA, 60 bp, Artificial Sequence
  Probe
agaactgccggtgtggtgagtctccagtatgggaggaagtgtccaactctctgctctttg

SEQ ID NO: 3710 - DNA, 60 bp, Artificial Sequence
  Probe
ccagagtttttgtttcctttgaagcagcaatttcaggagcagcagaggcaagggccagga

SEQ ID NO: 3711 - DNA, 60 bp, Artificial Sequence
  Probe
gttaggggttaaaatccccctcttaaacggtccgagggcagagaggtgaccaccgatagg

SEQ ID NO: 3712 - DNA, 60 bp, Artificial Sequence
  Probe
gtccccagccattgcttaagaagtgcaggtcacggagactttgctcctcgttttccagaa

SEQ ID NO: 3713 - DNA, 60 bp, Artificial Sequence
  Probe
aatctcagggacccctcatatgggctagtcccgggagggctgagatgtgaatttgtgaat

SEQ ID NO: 3714 - DNA, 60 bp, Artificial Sequence
  Probe
tgctgccacagcccaacattgaggagccctcgatgactgccctttacaactcatattcag

SEQ ID NO: 3715 - DNA, 60 bp, Artificial Sequence
  Probe
gataatcaggtctcaccaaacctggcagccttccactgtacgtgtgggcaaagaccaaca

SEQ ID NO: 3716 - DNA, 60 bp, Artificial Sequence
  Probe
ggggatgaagctcgctttgccggacataacttccgtaatcccagtgtgctgtgattcctc

SEQ ID NO: 3717 - DNA, 60 bp, Artificial Sequence
  Probe
aagttgatcaaagaagctgccgggaaaagcaatctgaagagggtgaccctggagcttgga

SEQ ID NO: 3718 - DNA, 60 bp, Artificial Sequence
  Probe
ctcccaaaaacatcagggcccccatcactccagaagaaagccaaggttgtctagtctggg

SEQ ID NO: 3719 - DNA, 60 bp, Artificial Sequence
  Probe
ggaaaaggctgcagaagacacaggtggaatccacatggaagaggccccagaaacctacat

SEQ ID NO: 3720 - DNA, 60 bp, Artificial Sequence
  Probe
gagagttctcaatgcatggcagctggctttcccagtgtgagtgacccaagaccaaggtag

SEQ ID NO: 3721 - DNA, 60 bp, Artificial Sequence
  Probe
gccctacaccattccttctgccctgcttttgctaggtcacagaggatctgcttggtcttg

SEQ ID NO: 3722 - DNA, 60 bp, Artificial Sequence
  Probe
cacaatccgttgttctgtcgtttagtgcatatctgctggcttcagccctggcagctgaga

SEQ ID NO: 3723 - DNA, 60 bp, Artificial Sequence
  Probe
aggtctaaagtggagagcaatgccattttaattctccctcccccaccccttttcaccccc

SEQ ID NO: 3724 - DNA, 60 bp, Artificial Sequence
  Probe
aagctgtggaagtcagcggttgaacctatttttcctaatgctcccctcagcactgccctc

SEQ ID NO: 3725 - DNA, 60 bp, Artificial Sequence
  Probe
cctttggcaaatgccacctgagaagccatgccagccctggaaacactttgaatcagatga

SEQ ID NO: 3726 - DNA, 60 bp, Artificial Sequence
  Probe
ccaacagacaaccccaaagtctggcacatcctcaaaatcacccctactcacctccccaaa

SEQ ID NO: 3727 - DNA, 60 bp, Artificial Sequence
  Probe
aaacacttttctaatcagggccagccactggagaaactgaaatgagtgggcggggtgcta

SEQ ID NO: 3728 - DNA, 60 bp, Artificial Sequence
  Probe
gacctcacaggaagcagtggactggcctgtttccccactgttctttctgttttcacacct

SEQ ID NO: 3729 - DNA, 60 bp, Artificial Sequence
  Probe
acaagagcaccatcggcagggacttgatagacgacctgaagtcagaactgagtggcaact

SEQ ID NO: 3730 - DNA, 60 bp, Artificial Sequence
  Probe
caacagtaagccacccactctggagtcacagaatctgccaggcggttcaagtgaaaacca

SEQ ID NO: 3731 - DNA, 60 bp, Artificial Sequence
  Probe
tgcagttcttgactcacctctctgggcctcaggttctacaaatgccagacacctagcgaa

SEQ ID NO: 3732 - DNA, 60 bp, Artificial Sequence
  Probe
taaaaaggaagtggggacagattcgcagcacagagtcgctggcatgtttcactcctgctt

SEQ ID NO: 3733 - DNA, 60 bp, Artificial Sequence
  Probe
atgtccctgtttccttcctccctgctccttgtagctccttctggacgaatgtccatcgtt

SEQ ID NO: 3734 - DNA, 60 bp, Artificial Sequence
  Probe
agggaatgatcccttatctctggttccctcatcagccccagcaatgtcctagtcttgggg

SEQ ID NO: 3735 - DNA, 60 bp, Artificial Sequence
  Probe
agagccctaaaaagcttctcagcagagcttagcctatctgcatggctgccaagtgttgca

SEQ ID NO: 3736 - DNA, 60 bp, Artificial Sequence
  Probe
ctcccttgggtcggagtcatgagcctgtgattgcctacacctgcgtgttattaggtctca

SEQ ID NO: 3737 - DNA, 60 bp, Artificial Sequence
  Probe
gcagattcctgagattgcagctaagtgggcctgaggtggggcccatgaatctggatttta

SEQ ID NO: 3738 - DNA, 60 bp, Artificial Sequence
  Probe
accccaaaaggctttcagccaaaacgtctgagcctaggtaggtttaccaagggaagccat

SEQ ID NO: 3739 - DNA, 60 bp, Artificial Sequence
  Probe
ggcattctctgctggtaattcctgaagaggcatgactgcttttctcagccccaagcctct

SEQ ID NO: 3740 - DNA, 60 bp, Artificial Sequence
  Probe
gtcaacaacctacgagagatccaagcactgaggcgcctgaatccgcacccaaacattctt

SEQ ID NO: 3741 - DNA, 60 bp, Artificial Sequence
  Probe
agaagatcctagagcttctgttggaggccatgggaccagattccagtgctcatgacccaa

SEQ ID NO: 3742 - DNA, 60 bp, Artificial Sequence
  Probe
gggaactacggcaaactggacagtactgccttagctgaaggcagcagcccctattcaatg

SEQ ID NO: 3743 - DNA, 60 bp, Artificial Sequence
  Probe
cctctgtattaccgttcctgtccctaacccaagtccttcagttctgggtgctccagcaca

SEQ ID NO: 3744 - DNA, 60 bp, Artificial Sequence
  Probe
agctggcacggagcgttgggcacatctttgagatggatgataatgacagccagaaggaag

SEQ ID NO: 3745 - DNA, 60 bp, Artificial Sequence
  Probe
gtgtaggatccactctttcctttgtgggaagtctggctcctggcctgcatttctgccttc

SEQ ID NO: 3746 - DNA, 60 bp, Artificial Sequence
  Probe
cgccaaatcctctttgagctgagatcagaggcaacagggctggacccaacagagttgaaa

SEQ ID NO: 3747 - DNA, 60 bp, Artificial Sequence
  Probe
tctagtcttgtctgctcatgctgggaggaaggcgctcatagtcacaatggagcagggaaa

SEQ ID NO: 3748 - DNA, 60 bp, Artificial Sequence
  Probe
gcccatgagctgttccggtattttcgaatgccagagctggttgacttccgacagtacgtg

SEQ ID NO: 3749 - DNA, 60 bp, Artificial Sequence
  Probe
ggggacttttacatcacaggggaccgagctcgcatggacaaggatggctacttttggttc

SEQ ID NO: 3750 - DNA, 60 bp, Artificial Sequence
  Probe
accaacgcctttcccggagagtacatccccaccgtgtttgacaactattcagccaatgtg

SEQ ID NO: 3751 - DNA, 60 bp, Artificial Sequence
  Probe
gccctgtcagagagggaggacacaatattctctcctgtgagcaagactggcacctgtcag

SEQ ID NO: 3752 - DNA, 60 bp, Artificial Sequence
  Probe
agcctagcttagatagctgggaaggcggaagaatgctcttcctcactgctcctttccctg

SEQ ID NO: 3753 - DNA, 60 bp, Artificial Sequence
  Probe
tctgcagagtctagctatccgccaacagggggtgccgtccaaattcatggcaaataaagg

SEQ ID NO: 3754 - DNA, 60 bp, Artificial Sequence
  Probe
attttgtgcccttaaaagccactggggatgacggatccaggattgtgggtggaggtagtg

SEQ ID NO: 3755 - DNA, 60 bp, Artificial Sequence
  Probe
gcttggaagtgccagctttactacccattccctttactgcctccttcccatgtcaggtgg

SEQ ID NO: 3756 - DNA, 60 bp, Artificial Sequence
  Probe
ttccagaggcaatgcctgagcagtcttgagggacatacaggagtttaggcactaggggac

SEQ ID NO: 3757 - DNA, 60 bp, Artificial Sequence
  Probe
tctgtgggaactggtgacacgggaggtaccctttgctgacctctccaatatggagattgg

SEQ ID NO: 3758 - DNA, 60 bp, Artificial Sequence
  Probe
ttgaatggggaaggagaggtggagaccacgccctcctcccttgtttagaattgtcttcgt

SEQ ID NO: 3759 - DNA, 60 bp, Artificial Sequence
  Probe
tggatcatggtggaggtgaggccagaaaggacagttgagcactcatcccaaagacagaga

SEQ ID NO: 3760 - DNA, 60 bp, Artificial Sequence
  Probe
acttttcacagtggccaacttgctagtgatggtggcttgcttctgtgcaatggtgccatc

SEQ ID NO: 3761 - DNA, 60 bp, Artificial Sequence
  Probe
gtgagtgaacaagggcaagaagggagaggtcaaaggctacaggagactgacagggagacc

SEQ ID NO: 3762 - DNA, 60 bp, Artificial Sequence
  Probe
gtatcgcttttcttgtgctacctgctgctcttcacttgcagtggggtggaggcaggtaag

SEQ ID NO: 3763 - DNA, 60 bp, Artificial Sequence
  Probe
caagtcatggagcacatctggaagctgcaggagttctgtaacagcatggcgaagctggat

SEQ ID NO: 3764 - DNA, 60 bp, Artificial Sequence
  Probe
ctcgagcctagccaagctaacacatgaaacacaccatcacagctggggaaaggatggctt

SEQ ID NO: 3765 - DNA, 60 bp, Artificial Sequence
  Probe
tgaagggcctccccgaattggagaagaaggattttgcctctatcctgaccaatgcaagcc

SEQ ID NO: 3766 - DNA, 60 bp, Artificial Sequence
  Probe
ctgagagctagtgagggttcagagaagccccatcctaagccagacacatgatgtgggctc

SEQ ID NO: 3767 - DNA, 60 bp, Artificial Sequence
  Probe
gccatgatgtgggcacatgaaccccaacctgggtgcacagagcaagactctgtatctaaa

SEQ ID NO: 3768 - DNA, 60 bp, Artificial Sequence
  Probe
tgcccatacccctggccaaggaagatccctttgtccacaagtaaaaggaaatgctcctcc

SEQ ID NO: 3769 - DNA, 60 bp, Artificial Sequence
  Probe
tgccaatccagagctgctgacaccttaaaaacactggcctttaacactaggatggcccca

SEQ ID NO: 3770 - DNA, 60 bp, Artificial Sequence
  Probe
ctgccatcatgttgacacctgaaggttggaaaaaccacggcctttgttactgcccaagca

SEQ ID NO: 3771 - DNA, 60 bp, Artificial Sequence
  Probe
gaaaaaccagtttggctggagccgaatgcaaagggcaagagaggtgagaggtgagacaga

SEQ ID NO: 3772 - DNA, 60 bp, Artificial Sequence
  Probe
actgccaggctcctacgacagcacatcctcagatagtttgtatccaaggggcatccagtt

SEQ ID NO: 3773 - DNA, 60 bp, Artificial Sequence
  Probe
acctctcgccatgatcagacatacagctgcctacctaatgaggacttcaagccccaccac

SEQ ID NO: 3774 - DNA, 60 bp, Artificial Sequence
  Probe
ctcattagcagttccgatctttgttgccctctcctgctttggctccatgaacggtggtgt

SEQ ID NO: 3775 - DNA, 60 bp, Artificial Sequence
  Probe
tcggcagctgcaggaaaagctggtctttgagaacctcaataccgacaagctcaacagcat

SEQ ID NO: 3776 - DNA, 60 bp, Artificial Sequence
  Probe
ggagccgtcctgaagatcaagacaccagtgaaatgaccagggcagagtccaggagaaaga

SEQ ID NO: 3777 - DNA, 60 bp, Artificial Sequence
  Probe
ctcagtcagtgaggagcaaagccaggactcaagtctgtcttcagactccaagcctacggc

SEQ ID NO: 3778 - DNA, 60 bp, Artificial Sequence
  Probe
aaggagtcttgtcggaatatggcaaaagtgttattcggcctgcagcggagcagctgttca

SEQ ID NO: 3779 - DNA, 60 bp, Artificial Sequence
  Probe
tttcctttcacctctgactgtggcctggtaaccctggggttgtccctgcttttttctgac

SEQ ID NO: 3780 - DNA, 60 bp, Artificial Sequence
  Probe
tggctttatgatgatgggggcatgcaggttgggttggtgctatgggatagagttgggaaa

SEQ ID NO: 3781 - DNA, 60 bp, Artificial Sequence
  Probe
gtcctacctgcacagcaacatgattgttcaccgggacattaagggagccaacatcctccg

SEQ ID NO: 3782 - DNA, 60 bp, Artificial Sequence
  Probe
aaatggaagcgtggatggtatcagggccctacccgtggtcttctcagattctgctagagc

SEQ ID NO: 3783 - DNA, 60 bp, Artificial Sequence
  Probe
ttgctcaggctattctctctggatggaattcccttccccaccttctctgcctggcagtag

SEQ ID NO: 3784 - DNA, 60 bp, Artificial Sequence
  Probe
ccgtgcattactgttgtctgaccaggtattgaggggccaccctctctctcacaggtgtac

SEQ ID NO: 3785 - DNA, 60 bp, Artificial Sequence
  Probe
tgtacccccttaaagcatgtccctgagttcatcacagaagactgctcctcctgtgccctc

SEQ ID NO: 3786 - DNA, 60 bp, Artificial Sequence
  Probe
ctggcccgcagatgctcatatgtgacaatctggagctcaactgaagaccaaggttgtcgc

SEQ ID NO: 3787 - DNA, 60 bp, Artificial Sequence
  Probe
aggacagatgagttccaatctatggagcactgaccctaccagtgcaggcagtagggttgc

SEQ ID NO: 3788 - DNA, 60 bp, Artificial Sequence
  Probe
cttctctctcccagataagttggtcctccctctgcctttcctctcaagcccccaaagagc

SEQ ID NO: 3789 - DNA, 60 bp, Artificial Sequence
  Probe
aagctcaggacgtcaaaaactcaccatggaccccaaggcagaaaccaagaactgtctgca

SEQ ID NO: 3790 - DNA, 60 bp, Artificial Sequence
  Probe
catgttcacctgtgatcggtcttcctgagtacatgcaggcatggaggcaaacatgcacct

SEQ ID NO: 3791 - DNA, 60 bp, Artificial Sequence
  Probe
tcagatttcctcgttgccccgtctcatacttcctgttcctcttctgggctctgccagaac

SEQ ID NO: 3792 - DNA, 60 bp, Artificial Sequence
  Probe
cagcgtcagtttctcaaaagcaggactcatggtttccccatgcgtaaggtcagcccttca

SEQ ID NO: 3793 - DNA, 60 bp, Artificial Sequence
  Probe
cagagaatccctaagttcaggcagtgatggcagcagccctctcatgtctagtgctgtcca

SEQ ID NO: 3794 - DNA, 60 bp, Artificial Sequence
  Probe
atgaagttgatgggaggattacggtggtaacagatactgtgcaggtgcccagagcgagct

SEQ ID NO: 3795 - DNA, 60 bp, Artificial Sequence
  Probe
agacctccattcctactcaagggagggtacacatctagaggacagaggacagggcacagc

SEQ ID NO: 3796 - DNA, 60 bp, Artificial Sequence
  Probe
gcgctcagcaaagtcttgagtggcagcagctatggggactgttcattccaaaacggtaga

SEQ ID NO: 3797 - DNA, 60 bp, Artificial Sequence
  Probe
gcctgtcctactccgtggatgcctttgactatgacctgcagacaggacagatctccaacc

SEQ ID NO: 3798 - DNA, 60 bp, Artificial Sequence
  Probe
gtcaaggctccaggcaggttgttactggtgtttgcagcctgtcagtacttgcagtactgg

SEQ ID NO: 3799 - DNA, 60 bp, Artificial Sequence
  Probe
tctcaggcatctacaaaggctctctcttcctccgtcagagtctggactgggttcactggt

SEQ ID NO: 3800 - DNA, 60 bp, Artificial Sequence
  Probe
tgggaggaaagtgtctactaggagggtggggtgagattctgtgttgatgtaggaggccga

SEQ ID NO: 3801 - DNA, 60 bp, Artificial Sequence
  Probe
agctgctgcctcacatcagcatgttgtcaggatcttgcatcagtattgagcaccagccat

SEQ ID NO: 3802 - DNA, 60 bp, Artificial Sequence
  Probe
ctgctatgactgtagcagggcttccgaaatacctgcctctcttgggtggatcactgtggt

SEQ ID NO: 3803 - DNA, 60 bp, Artificial Sequence
  Probe
aatggctgcctgggtttggaaggacaagttggaactggagatacccctgtgaagtgaagc

SEQ ID NO: 3804 - DNA, 60 bp, Artificial Sequence
  Probe
agccactacagtcaaatttctgtttgtggcctcccccaacccctcactatggctgattgg

SEQ ID NO: 3805 - DNA, 60 bp, Artificial Sequence
  Probe
ggctctggagttagattgcctggattcaaaccccagctccaaatcccagctccacacttc

SEQ ID NO: 3806 - DNA, 60 bp, Artificial Sequence
  Probe
tatctgcagaggatggcaagtctttgctccaaaacctaagggcctgtgctgtggttgacc

SEQ ID NO: 3807 - DNA, 60 bp, Artificial Sequence
  Probe
ttcttcttggagctattgagcctgagccgagagaaactttgggactccgagctgcatcca

SEQ ID NO: 3808 - DNA, 60 bp, Artificial Sequence
  Probe
cacactgacaggagttctcattcctccctccattgtcccgattctgccccatcgatgtga

SEQ ID NO: 3809 - DNA, 60 bp, Artificial Sequence
  Probe
gatgggatggatgtcttgatcccatggtgaggggatctaggcagcacactacagcatcca

SEQ ID NO: 3810 - DNA, 60 bp, Artificial Sequence
  Probe
gaaggtgaggacttggcccttttgtgggactgaattgacactagtgtggctggagtgtgc

SEQ ID NO: 3811 - DNA, 60 bp, Artificial Sequence
  Probe
ccccagaggagcagagggtcctggaaaggaagctgaaaaaggaacggaagaaagaggaga

SEQ ID NO: 3812 - DNA, 60 bp, Artificial Sequence
  Probe
cagcttcgacatccagtcgcgggactgcatatccaagaagcttgagaggctcgaatctga

SEQ ID NO: 3813 - DNA, 60 bp, Artificial Sequence
  Probe
tggccccctgatctgtgatggcatcatccaaggaatagactccttcgtgatctggggatg

SEQ ID NO: 3814 - DNA, 60 bp, Artificial Sequence
  Probe
ccagatgtcttccagattctgtgcctctggctttgttgtccagccaggcctgcagtttat

SEQ ID NO: 3815 - DNA, 60 bp, Artificial Sequence
  Probe
gctctaagtggtccaggagtccaagtaagcagtctggctggaataaggcagcatcacgga

SEQ ID NO: 3816 - DNA, 60 bp, Artificial Sequence
  Probe
tatctggtgatgcagagactctttccccgcatccctcacatgaaagaccccatcggtgac

SEQ ID NO: 3817 - DNA, 60 bp, Artificial Sequence
  Probe
gattgtcagggtggccaaggccaagtattcctgttcatgcccttgccacatctctggtat

SEQ ID NO: 3818 - DNA, 60 bp, Artificial Sequence
  Probe
tttgctgggttggaggcggagtttatttgttacaaccttggtctgaccggcagggatctg

SEQ ID NO: 3819 - DNA, 60 bp, Artificial Sequence
  Probe
gaacctcacagagacccaggtcaaaatctggttccagaaccgaagggccaaggcgaaaag

SEQ ID NO: 3820 - DNA, 60 bp, Artificial Sequence
  Probe
gaagatctccttgcagaggctgaagagctatgtgatcaccaccagcaggtgtccccagaa

SEQ ID NO: 3821 - DNA, 60 bp, Artificial Sequence
  Probe
accaagtcggtggttgtgaagagctggaccatcgggatcatcaaccgagtagttcagctt

SEQ ID NO: 3822 - DNA, 60 bp, Artificial Sequence
  Probe
tacgccttccccaaggccgtcagtgtcttcttcaaggagctcatacaggagtttgggatc

SEQ ID NO: 3823 - DNA, 60 bp, Artificial Sequence
  Probe
gaggcctgcctcaaatatcacttcccctgtgaagactgcctggtgttctccaggagagag

SEQ ID NO: 3824 - DNA, 60 bp, Artificial Sequence
  Probe
gcctggtgaagatgtgaagaccgataccagacaccaaagggctgcattgccttcttccaa

SEQ ID NO: 3825 - DNA, 60 bp, Artificial Sequence
  Probe
cagagggtcaagtctgcttccttgcctacatagccatgaacttcccagatctaggcgcca

SEQ ID NO: 3826 - DNA, 60 bp, Artificial Sequence
  Probe
aacatccatgtgacgggaagccatgggacagggtgtagaacaaggagaagcctgagagag

SEQ ID NO: 3827 - DNA, 60 bp, Artificial Sequence
  Probe
tggatgggagtgttgggattttgagctagggaacttggttttggtgacccagggcatgag

SEQ ID NO: 3828 - DNA, 60 bp, Artificial Sequence
  Probe
gcagttttgggactgggcagctatggaggtcacatcattcctttgcccttaggcttgagt

SEQ ID NO: 3829 - DNA, 60 bp, Artificial Sequence
  Probe
catttactgccggatggaccacaaagcagaagtggcttcttagcttcctccaggagctgc

SEQ ID NO: 3830 - DNA, 60 bp, Artificial Sequence
  Probe
atggaacgcagtatcaccacggctattcctacatcctgggctggatctgcttctgcttca

SEQ ID NO: 3831 - DNA, 60 bp, Artificial Sequence
  Probe
gcagactcagtgcagcacttccacaccaagaaggccctcaataaaggcttcctgaggaac

SEQ ID NO: 3832 - DNA, 60 bp, Artificial Sequence
  Probe
tgctgactcctggaagctggacctctttcagtcctgtttgaatgcgggcttcttgtttgg

SEQ ID NO: 3833 - DNA, 60 bp, Artificial Sequence
  Probe
tcttacccatcttttcaggcttcaccctgaagaactgggaggccctccactgaagaagct

SEQ ID NO: 3834 - DNA, 60 bp, Artificial Sequence
  Probe
ctcagagaggctgtcagctgggaaaagttattctcctgggcccttgaggccaaggtagat

SEQ ID NO: 3835 - DNA, 60 bp, Artificial Sequence
  Probe
ggggattggggggttggatagtgcagagtatggtactggcctaaggcactgaggatcatc

SEQ ID NO: 3836 - DNA, 60 bp, Artificial Sequence
  Probe
tccggggagaggcacatgaggtgaaatgttttccccctcccttccttgttgtctcttact

SEQ ID NO: 3837 - DNA, 60 bp, Artificial Sequence
  Probe
cttcgaccctaaagatgtcaaaggtgtgcagcttccaaacggcatccccaggatcactgg

SEQ ID NO: 3838 - DNA, 60 bp, Artificial Sequence
  Probe
gtctcacttctcaatgactggactgtgtgggtactctgctccagacatgcgtggcctcag

SEQ ID NO: 3839 - DNA, 60 bp, Artificial Sequence
  Probe
ggctcacctttgccgactgcgggttcgaaaggccattgggaaataccgtataaaactcct

SEQ ID NO: 3840 - DNA, 60 bp, Artificial Sequence
  Probe
gaggatgagtgacgagtttgtggactcctttaagaagggacttcctcgcccgaagagcgc

SEQ ID NO: 3841 - DNA, 60 bp, Artificial Sequence
  Probe
ttcctggaactgggcagggactcactgtgcttttctgagcttcttactcctgtgagtccc

SEQ ID NO: 3842 - DNA, 60 bp, Artificial Sequence
  Probe
actaccgggccccagagctcatctttggagccactgattacacctcatccatcgatgttt

SEQ ID NO: 3843 - DNA, 60 bp, Artificial Sequence
  Probe
aacccgatcaccgctggtcaccatgaaccacattgtgcaaaccttctctcctgtcaacag

SEQ ID NO: 3844 - DNA, 60 bp, Artificial Sequence
  Probe
ctgaacaagctgagggtgttggacccagaggttacccagcagaccatagagctgaaggaa

SEQ ID NO: 3845 - DNA, 60 bp, Artificial Sequence
  Probe
ttcaccaggctgagaccctaccctatggggtatatgggcttttacctgtgcaccagtgtg

SEQ ID NO: 3846 - DNA, 60 bp, Artificial Sequence
  Probe
tgggaaatggctatcctagatgaggaaggagtctgtggcaacaggccgagaattagggcc

SEQ ID NO: 3847 - DNA, 60 bp, Artificial Sequence
  Probe
gccatgcaaggaggtgtgtgcacgacatactaggccaagggaactatgcaagtgaaagct

SEQ ID NO: 3848 - DNA, 60 bp, Artificial Sequence
  Probe
acgagagcggggccaggacctcctatgatgagatttccttttgtacattctccctgcgtg

SEQ ID NO: 3849 - DNA, 60 bp, Artificial Sequence
  Probe
aagagtccaccaggccatggactcagtggctgtgtatcatggcaaaatcagcagggaaac

SEQ ID NO: 3850 - DNA, 60 bp, Artificial Sequence
  Probe
agacagggatgatctgactcaaggccactgaccaggctcccttttgccacatacaagagt

SEQ ID NO: 3851 - DNA, 60 bp, Artificial Sequence
  Probe
gacatctccaggtgggccacactttagcatttcagtaggtgccatgtgttgcagtgctca

SEQ ID NO: 3852 - DNA, 60 bp, Artificial Sequence
  Probe
ggccctcagaccagtagccagtatgaaactgaagcctcttgaccacagcctccatgagag

SEQ ID NO: 3853 - DNA, 60 bp, Artificial Sequence
  Probe
tgggcagtcaggaatcctgggagctaggctgtgtctgccactgattgactatgtgaatcg

SEQ ID NO: 3854 - DNA, 60 bp, Artificial Sequence
  Probe
gcctgatagaaagaaggcatgcgcacctgggctcaaactccagctgtgccacttagtaag

SEQ ID NO: 3855 - DNA, 60 bp, Artificial Sequence
  Probe
ccagtgtaggggagggatggtgaatgcctaccttctaaatggcactcactgtgaggtgct

SEQ ID NO: 3856 - DNA, 60 bp, Artificial Sequence
  Probe
aatgcttcctgcctatactgtgatcctcacaaaagggctctgtcctgtctggtgccagga

SEQ ID NO: 3857 - DNA, 60 bp, Artificial Sequence
  Probe
gctgtctctcagcgctccatccagcttgagagtaagggattaaccctccagaacagccag

SEQ ID NO: 3858 - DNA, 60 bp, Artificial Sequence
  Probe
cagagctcatgctgcatgtcaagtccgtcttcaggcacgcatgtgtaccagtggactttg

SEQ ID NO: 3859 - DNA, 60 bp, Artificial Sequence
  Probe
tcgcattaagaaagacccggtgccttacatctgtgccgagcccctcccttcgaatattct

SEQ ID NO: 3860 - DNA, 60 bp, Artificial Sequence
  Probe
gtggtgaaactcaatggtggtttgggaaccagcatgggctgcaaaggccctaaaagtctg

SEQ ID NO: 3861 - DNA, 60 bp, Artificial Sequence
  Probe
agacctgactctcttaaggaggctgagagcccaaactgctgtcccaaacatgcacttcct

SEQ ID NO: 3862 - DNA, 60 bp, Artificial Sequence
  Probe
gagagattgctctggcactggcagatcaagcagatggagtggagacagagtgtgtgcaga

SEQ ID NO: 3863 - DNA, 60 bp, Artificial Sequence
  Probe
ggattgcgagctggctgccgagtttttcggttgaagtgatgcacaccaccaacattcttg

SEQ ID NO: 3864 - DNA, 60 bp, Artificial Sequence
  Probe
agattctgcctcagaaaggacgtgggttggtgacaatggcatgggttaaaaagcgggtca

SEQ ID NO: 3865 - DNA, 60 bp, Artificial Sequence
  Probe
gaatcacctgagggtgcctggattcccgacttaattggtctgaggtgcacttgggctttg

SEQ ID NO: 3866 - DNA, 60 bp, Artificial Sequence
  Probe
cttttggaactggattcagttgaaactgggggccaggactctgtacggcaggccagaaaa

SEQ ID NO: 3867 - DNA, 60 bp, Artificial Sequence
  Probe
ctgtgtttgtgcatatgaagggagatgggggttaggtggaggaggagagcagcgtggtta

SEQ ID NO: 3868 - DNA, 60 bp, Artificial Sequence
  Probe
gacacccacttgtctcgtggttcgctcacttccttgtcccctaccttttccgtctgtcat

SEQ ID NO: 3869 - DNA, 60 bp, Artificial Sequence
  Probe
ggagaggggacttttgacattgccgtcttttgttagcctctcagccccagccttttccat

SEQ ID NO: 3870 - DNA, 60 bp, Artificial Sequence
  Probe
gtacctctttctgtggcggcgagtcctctgaaaatctggtggggagagtggatgaagctt

SEQ ID NO: 3871 - DNA, 60 bp, Artificial Sequence
  Probe
ttccagcaatgacccagagggatggtggggagacaggaaacatagatggtgaggcaagat

SEQ ID NO: 3872 - DNA, 60 bp, Artificial Sequence
  Probe
ggccaagcccaggtgcagtatgttcgtgtgtttaagcttcttagatgctggggtgtggaa

SEQ ID NO: 3873 - DNA, 60 bp, Artificial Sequence
  Probe
agggcatgttgcataacaaaacaagcagcatcaaacttgggggagaaggaaggcagcacg

SEQ ID NO: 3874 - DNA, 60 bp, Artificial Sequence
  Probe
tctggctttgctgctctgtggccatggcaagtttcttactctctctgagcctttgcatcc

SEQ ID NO: 3875 - DNA, 60 bp, Artificial Sequence
  Probe
gcagcagtggacagtgctgtgtatggagtccaaagaggagccaaaaagcccttggaaaga

SEQ ID NO: 3876 - DNA, 60 bp, Artificial Sequence
  Probe
ttggaaaaacctggaatccagtcctggcttcccaccttctggctatttgaccttgggcaa

SEQ ID NO: 3877 - DNA, 60 bp, Artificial Sequence
  Probe
aaaagattcccaagccaactgagttacctcacgtgggtcaggtctctgtggctctctgca

SEQ ID NO: 3878 - DNA, 60 bp, Artificial Sequence
  Probe
cagaggtgttaggtgcttttgtgagcacgtcccagtcaaggaaggcttcacagatgcagc

SEQ ID NO: 3879 - DNA, 60 bp, Artificial Sequence
  Probe
cgcagacctcaggaatgccttctacgtcctcttccccatctggttccatcttcaggaagc

SEQ ID NO: 3880 - DNA, 60 bp, Artificial Sequence
  Probe
tacaagcggctcaggtccatgactgatgtgtacctgctcaaccttgccatctcggatctg

SEQ ID NO: 3881 - DNA, 60 bp, Artificial Sequence
  Probe
gccctgcaaacttttctacccaggttctcagctccatctcctcaactcactgggctttgc

SEQ ID NO: 3882 - DNA, 60 bp, Artificial Sequence
  Probe
aaccggccttgtgacagtttctacttaaactctggctgcccccatgagggtatgacagga

SEQ ID NO: 3883 - DNA, 60 bp, Artificial Sequence
  Probe
agccactgccctagatcaaacctgtagatgttggagtcggaccctttttctgtcctgggg

SEQ ID NO: 3884 - DNA, 60 bp, Artificial Sequence
  Probe
aaaagcgtggcagctgcttttagatcttaagggcgtttctacagctttgagggccctggt

SEQ ID NO: 3885 - DNA, 60 bp, Artificial Sequence
  Probe
ttccctggtgctggtggaaatgaccatcacctcgttttatgccgtgtgcttttacctgct

SEQ ID NO: 3886 - DNA, 60 bp, Artificial Sequence
  Probe
ggtacatcgccattgtacaggcgactaagtcattccggctccgatccagaacactaccgc

SEQ ID NO: 3887 - DNA, 60 bp, Artificial Sequence
  Probe
tgaaatgactgagtacaaactggtggtggttggagcaggtggtgttgggaaaagcgcact

SEQ ID NO: 3888 - DNA, 60 bp, Artificial Sequence
  Probe
accctgtttttctgcccaaatgttgcctttttggcttgcccctgcctctatcttatgccc

SEQ ID NO: 3889 - DNA, 60 bp, Artificial Sequence
  Probe
tgggcaactccttgggacatgtggtgcacataccagcaaatgatctgccctttaagggaa

SEQ ID NO: 3890 - DNA, 60 bp, Artificial Sequence
  Probe
agttggactgactccagtactggcctaataactggcagcgggtaagtgaaaggagccagc

SEQ ID NO: 3891 - DNA, 60 bp, Artificial Sequence
  Probe
gcattgtgaccctggaggaggcaccatttgtcattgtggaaagtgtggaccctctgagtg

SEQ ID NO: 3892 - DNA, 60 bp, Artificial Sequence
  Probe
gcgggttggctttttgtcctcctgcattcaaaatgacatcagaatcctgcggctgaagcg

SEQ ID NO: 3893 - DNA, 60 bp, Artificial Sequence
  Probe
ccctgtgtagacccgaatcctgagtgctgcaagatctgtatgtggcacaagccactcaga

SEQ ID NO: 3894 - DNA, 60 bp, Artificial Sequence
  Probe
aaagggaggggagagaaaagccgcaaaggaaacatccacagccacaaaggaatggctgta

SEQ ID NO: 3895 - DNA, 60 bp, Artificial Sequence
  Probe
aaatcaaggagcaccctatagaaactgccctgggcccatccacttcttctccaccagtca

SEQ ID NO: 3896 - DNA, 60 bp, Artificial Sequence
  Probe
tccatggacatcatggtgtgggtggcctctttaccactggcttgtgctaaaagccttgac

SEQ ID NO: 3897 - DNA, 60 bp, Artificial Sequence
  Probe
gactgctgaggccacagcaacttaactggctagtgtgggtgaggcagaagtgtttgaagc

SEQ ID NO: 3898 - DNA, 60 bp, Artificial Sequence
  Probe
ggagaaggtgtctgcgggagccgatttcatcatcacgcagcttttctttgaggctgacac

SEQ ID NO: 3899 - DNA, 60 bp, Artificial Sequence
  Probe
cgacattatcaggtttgcgcctccgctggtgatcaaggaggatgagcttcgagagtccat

SEQ ID NO: 3900 - DNA, 60 bp, Artificial Sequence
  Probe
cacatccccacctctcatctgaccaatgggagactctgagcagctgagtgacttgggttg

SEQ ID NO: 3901 - DNA, 60 bp, Artificial Sequence
  Probe
ccgagaagtctgcaccaaccccaatgacgactgggtccaagagtacatcaaggatcccaa

SEQ ID NO: 3902 - DNA, 60 bp, Artificial Sequence
  Probe
aagctcatggaccaaatccatgaccacctggagatgcctgagttgagccggaaatttggg

SEQ ID NO: 3903 - DNA, 60 bp, Artificial Sequence
  Probe
tttagccacccgcatattctgcatctggaaggcgtcgtcacaaagcgaaagccgatcatg

SEQ ID NO: 3904 - DNA, 60 bp, Artificial Sequence
  Probe
acctctaggcattgcctcagacaggaagaagggctagagccaaaaattggggctagctga

SEQ ID NO: 3905 - DNA, 60 bp, Artificial Sequence
  Probe
tcacaagatgctctctggagccaagggggagaaatgggaatggaggaccagagacaaagg

SEQ ID NO: 3906 - DNA, 60 bp, Artificial Sequence
  Probe
aaccactcccagcattcctgcatgccctcttatccttcaggtccagctgtagttcctctg

SEQ ID NO: 3907 - DNA, 60 bp, Artificial Sequence
  Probe
acttgtgaccccagccatgtagtgagggtgctctttctctgtgcctgctccttatgagtg

SEQ ID NO: 3908 - DNA, 60 bp, Artificial Sequence
  Probe
tccagtggatccccaaaggatgtctatttttggccactccatgggaggtcatggagctct

SEQ ID NO: 3909 - DNA, 60 bp, Artificial Sequence
  Probe
tgaaaaccacctcagcatagtgtcacctgctcctctgacactgtcgcttctccatggcat

SEQ ID NO: 3910 - DNA, 60 bp, Artificial Sequence
  Probe
tttcccaaggtcacacagcaagttgatggcagagctgggtacaggactcagagcatctga

SEQ ID NO: 3911 - DNA, 60 bp, Artificial Sequence
  Probe
ctcatctcagggctgttggaagaagagagtaagggggtgtctgtgaatgtggggtgtggg

SEQ ID NO: 3912 - DNA, 60 bp, Artificial Sequence
  Probe
atgctttttgctggagcgttttctaccgacagtgacaagcaggctttcctctctgccagg

SEQ ID NO: 3913 - DNA, 60 bp, Artificial Sequence
  Probe
ccactatggtgtatgtcattgtgaggatgggtgcagagaggctgggtgggagaacggaaa

SEQ ID NO: 3914 - DNA, 60 bp, Artificial Sequence
  Probe
cagactcgagggccgaattgtttctagttaggccacgctcctctgttcagtcgcaaaggt

SEQ ID NO: 3915 - DNA, 60 bp, Artificial Sequence
  Probe
ctctcgccatggccaagtggctaaacaagtacttcagcttgggcaacagcaagaccaaga

SEQ ID NO: 3916 - DNA, 60 bp, Artificial Sequence
  Probe
cctcaatcttaggggaaaggctgaggcaccaagcaaggacacatgcagaccatttccagg

SEQ ID NO: 3917 - DNA, 60 bp, Artificial Sequence
  Probe
aggcctcccgcttctctctctcctgccagagtcttttcctgacatctctctgaacaacga

SEQ ID NO: 3918 - DNA, 60 bp, Artificial Sequence
  Probe
cccatggcagctttgtacctgcccctcaccactacctgagcccttttctaggaactactc

SEQ ID NO: 3919 - DNA, 60 bp, Artificial Sequence
  Probe
gagcatcagaggaaacaactgctgcattccagcatattggcactcagggagggcttcctg

SEQ ID NO: 3920 - DNA, 60 bp, Artificial Sequence
  Probe
tgtcaacaaggctgatatcgccatggtgatctgtgacacaccccaaaaggcattggtgct

SEQ ID NO: 3921 - DNA, 60 bp, Artificial Sequence
  Probe
gccataaccccggagtcagagggatgcctgggtcttaatctccacttgtcctacctccta

SEQ ID NO: 3922 - DNA, 60 bp, Artificial Sequence
  Probe
gtgtgagcaggagaggcacatgactggactcagatgttcacagactttccctggctcctg

SEQ ID NO: 3923 - DNA, 60 bp, Artificial Sequence
  Probe
gagacctgagtcttggtccctgcttctgatgacatgtcacatgggcatgtgctcgtcact

SEQ ID NO: 3924 - DNA, 60 bp, Artificial Sequence
  Probe
tgatggaggccagcagaacaaacatagatgagtcagctatgcctccaccaccacctcagg

SEQ ID NO: 3925 - DNA, 60 bp, Artificial Sequence
  Probe
gcggttttagtggttagaagccgcaggtaaggtccttcccaggccagctcaagtttttcc

SEQ ID NO: 3926 - DNA, 60 bp, Artificial Sequence
  Probe
gaatccagtatgcaatggatgtcgcacacaagagagagagacgcaggtgaccggagccat

SEQ ID NO: 3927 - DNA, 60 bp, Artificial Sequence
  Probe
ggcagccttcctaggttcttcctgtcttccaagtgctagccatgcactttgtgctgaagc

SEQ ID NO: 3928 - DNA, 60 bp, Artificial Sequence
  Probe
ttcaccctggtctgctctgaagtttggatacaagtcctgacccatgggcatggttcagga

SEQ ID NO: 3929 - DNA, 60 bp, Artificial Sequence
  Probe
tgagtgacccagaaggggtggcgaaggcacagctcagagacataaagagaagatgccaag

SEQ ID NO: 3930 - DNA, 60 bp, Artificial Sequence
  Probe
tgttcgagggtaccaggagagctggcgatgactgaactgctgatggacaaatgctctgtg

SEQ ID NO: 3931 - DNA, 60 bp, Artificial Sequence
  Probe
tggaagccacggtggataaggacaagagccagcccaacatgctttttgttgagatccctg

SEQ ID NO: 3932 - DNA, 60 bp, Artificial Sequence
  Probe
gtgccctgcatcttgaggcttgggtctgtccaataattttaagcccctgggctctgctac

SEQ ID NO: 3933 - DNA, 60 bp, Artificial Sequence
  Probe
ctcttcacaggtcagtgctacgtgggatcacaggtcacatgtgaggtccaaagaccagcc

SEQ ID NO: 3934 - DNA, 60 bp, Artificial Sequence
  Probe
gtgagaaccataggaatacacccactgcggtgcccaggtgtgaccaggtgcagatattct

SEQ ID NO: 3935 - DNA, 60 bp, Artificial Sequence
  Probe
cgatgggggtctcattggcccaaaaggggaaactggaactaagggagagaaaggagacct

SEQ ID NO: 3936 - DNA, 60 bp, Artificial Sequence
  Probe
atgatcagaaaggggcctggccatttgacaggtggtcagtttacaatgcctgtgatgcca

SEQ ID NO: 3937 - DNA, 60 bp, Artificial Sequence
  Probe
cagtacctgaagaggatgatgccctcatactgccaggtgggatgaaagtccaggcatccc

SEQ ID NO: 3938 - DNA, 60 bp, Artificial Sequence
  Probe
cacccgttggtttgaagaagggcgggctctcacataagcaaccaggtaaggaaaggaagc

SEQ ID NO: 3939 - DNA, 60 bp, Artificial Sequence
  Probe
ccactttcttcctcagctgccacatccaaaccatgggtaagcgatgcttgatctgcctcc

SEQ ID NO: 3940 - DNA, 60 bp, Artificial Sequence
  Probe
ttctaagggatggcacgctgtgcttgagaccaacctgacgggtaccttctacatgtgcaa

SEQ ID NO: 3941 - DNA, 60 bp, Artificial Sequence
  Probe
caaccagcccctgccatttcttaagactttctgctgcactcacaggatcctgagctgcac

SEQ ID NO: 3942 - DNA, 60 bp, Artificial Sequence
  Probe
tcccaagaaacccttcaggaaactcaacgcctttggcaacgccttcttgaacaggttcgt

SEQ ID NO: 3943 - DNA, 60 bp, Artificial Sequence
  Probe
ggactacactcatgaggccgtcaccataaagtgtaccttctccgcaaccggatgcccttc

SEQ ID NO: 3944 - DNA, 60 bp, Artificial Sequence
  Probe
ccaggctggagcaaggtaccttttcttaggatcttgggagggaatggatgcccctctctg

SEQ ID NO: 3945 - DNA, 60 bp, Artificial Sequence
  Probe
taggaggctgctagttaggaagatggcagtggctgtaggctgggttgccagaaaagatgg

SEQ ID NO: 3946 - DNA, 60 bp, Artificial Sequence
  Probe
ggtagcctggggctagatgtggaactccatggatctgtgttctgactggcacctttggaa

SEQ ID NO: 3947 - DNA, 60 bp, Artificial Sequence
  Probe
gtctacgaagcctgtgttccagcccttttcaggacagggtcacagactaggaagtgccac

SEQ ID NO: 3948 - DNA, 60 bp, Artificial Sequence
  Probe
gagttcccagaagcttgtctctgcttttctaggcagctgccacagcctgtcacaaacagc

SEQ ID NO: 3949 - DNA, 60 bp, Artificial Sequence
  Probe
agtgccctcatttaagaggccaagatcctgattcagaggaggcatcctttgcccagagct

SEQ ID NO: 3950 - DNA, 60 bp, Artificial Sequence
  Probe
gttcacctgcttgaggtcagttccttgagcgtcttccacttgccatgttcaccacagtgc

SEQ ID NO: 3951 - DNA, 60 bp, Artificial Sequence
  Probe
agtgtcacccttctgctcgttgttctggctcttggtggagtggtttggtaccaacatcga

SEQ ID NO: 3952 - DNA, 60 bp, Artificial Sequence
  Probe
cacacctggatgattgccattgcttccaaaatgacggtcgctctgctcccaatctctccc

SEQ ID NO: 3953 - DNA, 60 bp, Artificial Sequence
  Probe
aaatgtgatggggttctgcagttagatgagtctgaaagtggggctggggctgctctgaga

SEQ ID NO: 3954 - DNA, 60 bp, Artificial Sequence
  Probe
tgtctctaagcccccttcccttccactatgagctgctggcagtgggtttgtattcggttc

SEQ ID NO: 3955 - DNA, 60 bp, Artificial Sequence
  Probe
ccccaccccttttccccctttccagagttttgttctgtggcattgccttgggtaagtaca

SEQ ID NO: 3956 - DNA, 60 bp, Artificial Sequence
  Probe
tgcctctcagtgtctgacttcgacaacgccaagggcctcaacgtgaagcactacaagatc

SEQ ID NO: 3957 - DNA, 60 bp, Artificial Sequence
  Probe
ttagtggactggaaaccaagtgaacctggaaaccacaagcagctgtggcaaatcctgcca

SEQ ID NO: 3958 - DNA, 60 bp, Artificial Sequence
  Probe
ggaagagagccaaatgcaaaccagacgatatcccagctggtttgaatggcctccaccgtg

SEQ ID NO: 3959 - DNA, 60 bp, Artificial Sequence
  Probe
gctgttggctggaggcctcacttcctcatcattagacctcttcacaggctgtgagtgtcc

SEQ ID NO: 3960 - DNA, 60 bp, Artificial Sequence
  Probe
atgaagggactcctgcagtccatgaggaagaggacagaagtgagcgcccaaccaaaatga

SEQ ID NO: 3961 - DNA, 60 bp, Artificial Sequence
  Probe
aaaagcccctgttccaaggacatgggaggaggacaaggccatccttagtgacattcagga

SEQ ID NO: 3962 - DNA, 60 bp, Artificial Sequence
  Probe
ctacagggcggcaaccagcaggtacacactgaattttgaggctgctcagaaggcttgttt

SEQ ID NO: 3963 - DNA, 60 bp, Artificial Sequence
  Probe
tgtccagctcaaccggcccaacaagaggaatgccatgaacaaggtcttctggagagagat

SEQ ID NO: 3964 - DNA, 60 bp, Artificial Sequence
  Probe
ggacccaggaaaggcaggattgaaaatgtccaggaaagtggccaagaagcagtggcctta

SEQ ID NO: 3965 - DNA, 60 bp, Artificial Sequence
  Probe
cctctctacagcattcccatcgagaacatcctggcagtggagaagctggaggaggagtct

SEQ ID NO: 3966 - DNA, 60 bp, Artificial Sequence
  Probe
taagggagctatgggatgtgtggaggagtgtttgccacagaggaactggcagtttcagca

SEQ ID NO: 3967 - DNA, 60 bp, Artificial Sequence
  Probe
cgtgaagtcggtccaggccacgactgagaacaaggaactgaaaaccgtcaccttctccaa

SEQ ID NO: 3968 - DNA, 60 bp, Artificial Sequence
  Probe
tgccatcttcctggaggatgccgtctacctgtacaagaacaccctttgccccatcaagag

SEQ ID NO: 3969 - DNA, 60 bp, Artificial Sequence
  Probe
tccgggactgggatcagaccagaggcgatcatgtgaagcattacaagatccgcaaactgg

SEQ ID NO: 3970 - DNA, 60 bp, Artificial Sequence
  Probe
taaacgtggaaccccagagtggcttgtgtcctggtggacctaaagtggtgcacatgatct

SEQ ID NO: 3971 - DNA, 60 bp, Artificial Sequence
  Probe
gaaagactcccttgcctggcctcagcggatggagatttggaaggatggatgagtggatga

SEQ ID NO: 3972 - DNA, 60 bp, Artificial Sequence
  Probe
tgctgttgagcttggccagagtacccaagtttgacctctgcacagaccttactacccacc

SEQ ID NO: 3973 - DNA, 60 bp, Artificial Sequence
  Probe
tgccaatgtcctgaaggacgaaggactgaaaactctctgcgaggccttgaaacatccgga

SEQ ID NO: 3974 - DNA, 60 bp, Artificial Sequence
  Probe
tgctgcttcatgcctgacaatattctgatctttgtcagtgtctcagccctccccacccct

SEQ ID NO: 3975 - DNA, 60 bp, Artificial Sequence
  Probe
gaagggctgtaccccatgacacagctagaggaggatggggactcttaacacaggctctct

SEQ ID NO: 3976 - DNA, 60 bp, Artificial Sequence
  Probe
acgaattaaggcgtcgaggtggaaaatatgccgttggatcagcttgcattggaggtggcc

SEQ ID NO: 3977 - DNA, 60 bp, Artificial Sequence
  Probe
atgaagtggccttcatgctctgcaggaaggatgcagtggtgtcctttggcaaagtcttcc

SEQ ID NO: 3978 - DNA, 60 bp, Artificial Sequence
  Probe
gcactgaatttgtctcaggcaccgtgcaaggctctttacaaacgtgagctccttcgcctc

SEQ ID NO: 3979 - DNA, 60 bp, Artificial Sequence
  Probe
gcaaaggccaggatggaattggtagcaaggcagagaagactctgggtgactttgcagcag

SEQ ID NO: 3980 - DNA, 60 bp, Artificial Sequence
  Probe
gtgggggatgccatcctgtctgtgaatggggaagacttgtcctctgctacccatgatgag

SEQ ID NO: 3981 - DNA, 60 bp, Artificial Sequence
  Probe
ggaacttcaaggatccatcatgggatgcaggacagtaggctccacccctcttcctgcttt

SEQ ID NO: 3982 - DNA, 60 bp, Artificial Sequence
  Probe
cctgggaccaccagtagccatcttgtttgccacatggagagagactgtgaggacagaagc

SEQ ID NO: 3983 - DNA, 60 bp, Artificial Sequence
  Probe
acgtggaacttagtggtctccctgagttgcggagataggagttggaagtctgaggaggcc

SEQ ID NO: 3984 - DNA, 60 bp, Artificial Sequence
  Probe
agaaagcagccctctacctccgaaaaacagcaagacgttgctttcctgccataaacgccc

SEQ ID NO: 3985 - DNA, 60 bp, Artificial Sequence
  Probe
agcccaagaacagaaagaaccttgctggggttggaggtttcacttgcacatcatggaggg

SEQ ID NO: 3986 - DNA, 60 bp, Artificial Sequence
  Probe
cttttgcacttgctaattccttctgcgctggggagagctcaaaccctgcccgaaacttct

SEQ ID NO: 3987 - DNA, 60 bp, Artificial Sequence
  Probe
atggctgctgagttccagaaggcaaagacacagagatggctcagctccatcaagtggagt

SEQ ID NO: 3988 - DNA, 60 bp, Artificial Sequence
  Probe
gctgccatctgccacctgctaccattgacctacgtgaacacagacattctgtctccacct

SEQ ID NO: 3989 - DNA, 60 bp, Artificial Sequence
  Probe
gtttggtaaaagcgagaggggaaagcctgagcatgcagagtgtgcagagcacgagctttt

SEQ ID NO: 3990 - DNA, 60 bp, Artificial Sequence
  Probe
caaagatctcagcagccagctcctggtagctgatgaggatcagagcgtttgttcccccat

SEQ ID NO: 3991 - DNA, 60 bp, Artificial Sequence
  Probe
acaccaccctgttaagcccaggtggtgaagagctggttaggttggtcatttgcaaaaccg

SEQ ID NO: 3992 - DNA, 60 bp, Artificial Sequence
  Probe
atgtgcccagcctgcctggagaaaagtgtctgctcctagccaagatctcctcatcacaaa

SEQ ID NO: 3993 - DNA, 60 bp, Artificial Sequence
  Probe
ttctctgccccctgttgctgctactgtggttccaaacccttaccatctcctgcctgtatc

SEQ ID NO: 3994 - DNA, 60 bp, Artificial Sequence
  Probe
cagagacctccggggagcagctgggcattagtgataatggagggctctttgtgatggatg

SEQ ID NO: 3995 - DNA, 60 bp, Artificial Sequence
  Probe
aaagcagcagccatcatggacctggagtgcagtgtgcccatcagtaaactctgcaaacaa

SEQ ID NO: 3996 - DNA, 60 bp, Artificial Sequence
  Probe
caggaaagcaggaaggctgaagcatcactggctgtgacaaacctgagcccaaactgttca

SEQ ID NO: 3997 - DNA, 60 bp, Artificial Sequence
  Probe
tcacacatgtaacaggtgcagagccaagactgcaggctggtttgtctgactccagaacct

SEQ ID NO: 3998 - DNA, 60 bp, Artificial Sequence
  Probe
tgccagtccctgcactcttcctttctggccaaggatgatgtcagttctgctgctactagc

SEQ ID NO: 3999 - DNA, 60 bp, Artificial Sequence
  Probe
taaaaggcgcaaccaagaacgcctcaatccccgagacgtggagtatggcactatcgaagg

SEQ ID NO: 4000 - DNA, 60 bp, Artificial Sequence
  Probe
ccacaccccaacctaagagtgcacatctgtgtgcctagcctgatccaggattcacgtgag

SEQ ID NO: 4001 - DNA, 60 bp, Artificial Sequence
  Probe
gcgtgccaggaaacatggactggtagactttgaaggagagatgctatggcaaggccgaga

SEQ ID NO: 4002 - DNA, 60 bp, Artificial Sequence
  Probe
ggagacccttgccaacatcacagctagggtcttacttgccttccgtgtgagtaaggccag

SEQ ID NO: 4003 - DNA, 60 bp, Artificial Sequence
  Probe
aggacgaccacacgccgcttcctgtagcatgtgtcgtggttgtaattctctcatgtgcat

SEQ ID NO: 4004 - DNA, 60 bp, Artificial Sequence
  Probe
ggtctctctccagaccttgcccaaattccagtgtctgggtaagggctggtcacagaacac

SEQ ID NO: 4005 - DNA, 60 bp, Artificial Sequence
  Probe
tagtcaataggcggtcactggtgaccataacaggatgcatttcagggcagtggttgcgga

SEQ ID NO: 4006 - DNA, 60 bp, Artificial Sequence
  Probe
tacaactgagtccttaaacagggcatctccaggaaggcggggcttcaaccttgagacagc

SEQ ID NO: 4007 - DNA, 60 bp, Artificial Sequence
  Probe
gttcccccaaactgcaattggggttggagcacctggaaagaaaagggatatgtccagcga

SEQ ID NO: 4008 - DNA, 60 bp, Artificial Sequence
  Probe
tttggctgtggcctcttccagtaattgctctgctgggaaagtcattggccaaggatgctc

SEQ ID NO: 4009 - DNA, 60 bp, Artificial Sequence
  Probe
ttcttgttctggccctccacagtggtgaagaagggagttttacgtagcccaggcactcac

SEQ ID NO: 4010 - DNA, 60 bp, Artificial Sequence
  Probe
gtcatcaaagactgcacagctactgagtggccaaggctttgctccctctccttgaggaca

SEQ ID NO: 4011 - DNA, 60 bp, Artificial Sequence
  Probe
tgtgccataagtggatgctctgacagccatgatgttccgagttccttccccacagtcagg

SEQ ID NO: 4012 - DNA, 60 bp, Artificial Sequence
  Probe
ttgcctctggtcagaggtacagtagcgtgaggattcgtagtgtggctggcgttctcatca

SEQ ID NO: 4013 - DNA, 60 bp, Artificial Sequence
  Probe
cttcttcagacagccaggcctgcgacgactgagtatgtaggtgtatgggatggagtccgt

SEQ ID NO: 4014 - DNA, 60 bp, Artificial Sequence
  Probe
ttcttctccagtcccctgtggtttctgttggagcataaggtttccagtaagcgggagggc

SEQ ID NO: 4015 - DNA, 60 bp, Artificial Sequence
  Probe
cggatcacgtacctgtgcagaaaccgcctctgtggctgcatttgaaataaaacccgaccc

SEQ ID NO: 4016 - DNA, 60 bp, Artificial Sequence
  Probe
caccaagacacagacacgtactcttcaccggctccttttgcttctccttcctgcaggacg

SEQ ID NO: 4017 - DNA, 60 bp, Artificial Sequence
  Probe
cagcactatggcccctctgtcatcacctcactagatgaacaggatgcccttggccacttc

SEQ ID NO: 4018 - DNA, 60 bp, Artificial Sequence
  Probe
gtgcagtgacacggcacagatccatggagtgtggaatgtgtggatggcactttgggattc

SEQ ID NO: 4019 - DNA, 60 bp, Artificial Sequence
  Probe
ctcactcatcctctttcctgctcccccacagcttttctgttgcttcagtggcctgactct

SEQ ID NO: 4020 - DNA, 60 bp, Artificial Sequence
  Probe
tgatggtcaggggtgctgtttcagaatgtggcctgttcttactgctgggtgactcgaaca

SEQ ID NO: 4021 - DNA, 60 bp, Artificial Sequence
  Probe
tcacagaaacatgaactaccagccttggaggggccctgagagcccatctagttcaatgcc

SEQ ID NO: 4022 - DNA, 60 bp, Artificial Sequence
  Probe
ctgctgggggatgcttcagtttcctttacagaaaactgcgtggtgggaatccaggccaat

SEQ ID NO: 4023 - DNA, 60 bp, Artificial Sequence
  Probe
ggtctgccagctcgaaataactccagcaacttctttggaagccctaacaatggcccgcag

SEQ ID NO: 4024 - DNA, 60 bp, Artificial Sequence
  Probe
acacgcttctgcagctgtgcctcggctcacaacacagattgactgctctgactttgacta

SEQ ID NO: 4025 - DNA, 60 bp, Artificial Sequence
  Probe
acctgagaagtggcaggtggaggacccttccagtgatgctctcgttataggaagacaggg

SEQ ID NO: 4026 - DNA, 60 bp, Artificial Sequence
  Probe
agttcctgctggccttgtacttcctctttgctgatgccatgcagctgaatgacaagtggc

SEQ ID NO: 4027 - DNA, 60 bp, Artificial Sequence
  Probe
tccctcaaaggaagccctgccctttcacatccttctcctcgaaagtcaccctggactttg

SEQ ID NO: 4028 - DNA, 60 bp, Artificial Sequence
  Probe
cctgagcctaggcttggtgctggcacaccatcacttccacacattcttttgtccaaagca

SEQ ID NO: 4029 - DNA, 60 bp, Artificial Sequence
  Probe
ggtactgggacatcaagacatgactgggaagagggggtgagagtccagaaggggtaccag

SEQ ID NO: 4030 - DNA, 60 bp, Artificial Sequence
  Probe
gtgtttttaagcataaggccactgatccaggccagaacccagggtgggatttgcgctcat

SEQ ID NO: 4031 - DNA, 60 bp, Artificial Sequence
  Probe
aagagctgggagtattggaatccaggttgctccaactccacagccagcactcttcccttt

SEQ ID NO: 4032 - DNA, 60 bp, Artificial Sequence
  Probe
cacattgccgcacctttcaaagaggaagaaaagagcccagtatctgcccccaaactcccc

SEQ ID NO: 4033 - DNA, 60 bp, Artificial Sequence
  Probe
gacgttccagcggtagaaatcacccacaccttctgggaaaggaacctgccctctgtttct

SEQ ID NO: 4034 - DNA, 60 bp, Artificial Sequence
  Probe
acactgtctgtgggtgctgtgccctgttggaactctctttaacgtcttacgttggagccg

SEQ ID NO: 4035 - DNA, 60 bp, Artificial Sequence
  Probe
ctcagtgtcgaagacatgttcaagagccctctgaaggtccccgccttgattcagtgcctg

SEQ ID NO: 4036 - DNA, 60 bp, Artificial Sequence
  Probe
cttaccaaacctgctcatgcggctggaacagatgcctgactattccatcttccggggcta

SEQ ID NO: 4037 - DNA, 60 bp, Artificial Sequence
  Probe
caaaaaaccacagggcttttgggcactgcctccttgggaagttagtggccacagaagaga

SEQ ID NO: 4038 - DNA, 60 bp, Artificial Sequence
  Probe
aatggtgacagtgttggcaaggaaacagcaacacaggctgcgctgttggtaggagtgaaa

SEQ ID NO: 4039 - DNA, 60 bp, Artificial Sequence
  Probe
actcagcataggggctgagtgccaaggtaagacttccccctcaccctctgaaggttcata

SEQ ID NO: 4040 - DNA, 60 bp, Artificial Sequence
  Probe
agacacctcacactgaaaagtctgaaagcagcggtcaaacgctaatggccaaaaggcccc

SEQ ID NO: 4041 - DNA, 60 bp, Artificial Sequence
  Probe
ctcagcttcactggttttgttgcatgagttcgttctctgggcctgcggttccccaagttc

SEQ ID NO: 4042 - DNA, 60 bp, Artificial Sequence
  Probe
cagtcatgcagagtagcaatgctgggagtgctgggcccctgctatatcaatgctaggagg

SEQ ID NO: 4043 - DNA, 60 bp, Artificial Sequence
  Probe
gagacaaagcagcaattaaagtcagcccagcaccaactccgacgccaagcgttacactgg

SEQ ID NO: 4044 - DNA, 60 bp, Artificial Sequence
  Probe
ggtccctctgcagcagaacttccaggacaaccaattccaggggaagtggtatgtggtagg

SEQ ID NO: 4045 - DNA, 60 bp, Artificial Sequence
  Probe
atcacgcccattataaaccactggagttcacggtggctggacgagatgcatcccagtgtt

SEQ ID NO: 4046 - DNA, 60 bp, Artificial Sequence
  Probe
ggaagttccccaaactcagagtaggacacgtgcttttcaggcttcctggccaggtctcag

SEQ ID NO: 4047 - DNA, 60 bp, Artificial Sequence
  Probe
agacacacgagcttgtttctgcctcaggatctctggagttgtcattgctcatgcctggca

SEQ ID NO: 4048 - DNA, 60 bp, Artificial Sequence
  Probe
ccagtttggaggaagggtctgagcacatgtggctgagcatccccatttctctggagaagt

SEQ ID NO: 4049 - DNA, 60 bp, Artificial Sequence
  Probe
tgtgtgctccttgaggtcagagatgtgtcttgtgcatcatcagggaccctggtgcaacaa

SEQ ID NO: 4050 - DNA, 60 bp, Artificial Sequence
  Probe
tcggtcttcaccaccttgcccgacttgctcttcatctttgagtttatcttcgggggcctg

SEQ ID NO: 4051 - DNA, 60 bp, Artificial Sequence
  Probe
gcgcaggggagactcctatgacctcaaggactttgtaaacctgcacagcttccaggttcg

SEQ ID NO: 4052 - DNA, 60 bp, Artificial Sequence
  Probe
gcgaatcgggtctgcttgtgttttccaggtggaataagtgggctctgagtcgtgggaaga

SEQ ID NO: 4053 - DNA, 60 bp, Artificial Sequence
  Probe
caacactacagagctgggggatctcagccattgttttcccagtggagaccactcttggca

SEQ ID NO: 4054 - DNA, 60 bp, Artificial Sequence
  Probe
agaacgctcaggttggaaaagccactgtagcatctggcatatctcctggctggatgggtt

SEQ ID NO: 4055 - DNA, 60 bp, Artificial Sequence
  Probe
ctgaactgcacaggtggctgtgtgtttctggactctccattctgtcccagtggtctgtcc

SEQ ID NO: 4056 - DNA, 60 bp, Artificial Sequence
  Probe
tgtgtctggggccagcactgatccacacagctaagtttgcacttgtcttccctctcatgt

SEQ ID NO: 4057 - DNA, 60 bp, Artificial Sequence
  Probe
ggcatcggtaaacagtcatggcactggagggagtatcttatgcccacgagcaatgaggca

SEQ ID NO: 4058 - DNA, 60 bp, Artificial Sequence
  Probe
aatagcagggactagctggctggactggcccccttctttttcagtggccagtaaagacag

SEQ ID NO: 4059 - DNA, 60 bp, Artificial Sequence
  Probe
aaacaccgcaaaatgaccctggtggaggagggctttaaccctgctgtcatcaaagatgcc

SEQ ID NO: 4060 - DNA, 60 bp, Artificial Sequence
  Probe
gcccggaggaaatgggaggtgttcccgggaagaaacaagttcttctgtaacgggaggatc

SEQ ID NO: 4061 - DNA, 60 bp, Artificial Sequence
  Probe
ctgaccactatgcccactgactccctcagtgtttccactctacccctcccagaggttcag

SEQ ID NO: 4062 - DNA, 60 bp, Artificial Sequence
  Probe
ggtgtcagactgcaggaaaggagctcactctgctggggtggatatctgaggcagagatct

SEQ ID NO: 4063 - DNA, 60 bp, Artificial Sequence
  Probe
ctcgttctgttcctgggggtgcttgcttgttctaggccccctttgtatggagaggttcaa

SEQ ID NO: 4064 - DNA, 60 bp, Artificial Sequence
  Probe
cctcccctattccactccaccttcactgggttctccagtcagtagttcccatgtgcctct

SEQ ID NO: 4065 - DNA, 60 bp, Artificial Sequence
  Probe
agtggacagttggaggccttgaggttcttagccaagtacggtgctgacatcaacacgcag

SEQ ID NO: 4066 - DNA, 60 bp, Artificial Sequence
  Probe
caccatcaagatccttaagaaggggcaggctgtagactacgagggctccagaacccagga

SEQ ID NO: 4067 - DNA, 60 bp, Artificial Sequence
  Probe
gcctccttctcatcctaatcccccttctccagctgatcaacccggggagtactcagtgtt

SEQ ID NO: 4068 - DNA, 60 bp, Artificial Sequence
  Probe
cggaggtcctcaagaagtttgctgctgactttgctgcagaggctgcatccaaaaccgaag

SEQ ID NO: 4069 - DNA, 60 bp, Artificial Sequence
  Probe
gggcctttgcaggtgccaaataaatttcaggacagagcctaaggcagagctctggcacag

SEQ ID NO: 4070 - DNA, 60 bp, Artificial Sequence
  Probe
cccctgaagcagaagtcttgggtcaggccataagcaaagagcacaggggatatgtgagct

SEQ ID NO: 4071 - DNA, 60 bp, Artificial Sequence
  Probe
ggaaggatgaggactccaaacagccagctcccatgccaaatagaacgatgagtgctggga

SEQ ID NO: 4072 - DNA, 60 bp, Artificial Sequence
  Probe
gcagattgacagcccacaggtgtacgcgatgtgacaagacgacgtgcaaagaccacagta

SEQ ID NO: 4073 - DNA, 60 bp, Artificial Sequence
  Probe
tgcagccaggtttagcctttggctttggtcacacaggatattctgctgtgttgcaaccca

SEQ ID NO: 4074 - DNA, 60 bp, Artificial Sequence
  Probe
tccgcctgactgagctgggaaccattgcttccttgctgtgtgaccttctgcacgttatta

SEQ ID NO: 4075 - DNA, 60 bp, Artificial Sequence
  Probe
atggcagcccatcgagtacggcaagaagaagctgaaatacctgccctacaatcaccagca

SEQ ID NO: 4076 - DNA, 60 bp, Artificial Sequence
  Probe
ggctacactgccgtaatgatcactcccttggcttccgcagagaccaatgaagacatggct

SEQ ID NO: 4077 - DNA, 60 bp, Artificial Sequence
  Probe
tgagatcacacattgagttgatggcaaaagcagaagcctaggcctcccgcctgcaaatgc

SEQ ID NO: 4078 - DNA, 60 bp, Artificial Sequence
  Probe
cctcatctgtaaagtgtgggtaacagcatctgccggtaacagcacctgccgtgaagggaa

SEQ ID NO: 4079 - DNA, 60 bp, Artificial Sequence
  Probe
actacgtaaggactccaagatgtacaaggaccgcatcgaggccatcctgctgcagatgga

SEQ ID NO: 4080 - DNA, 60 bp, Artificial Sequence
  Probe
gactcatggatccccaggcctgcagccacttcagagactttgaccacaatcttcagctgt

SEQ ID NO: 4081 - DNA, 60 bp, Artificial Sequence
  Probe
cagacttccagcatgaggacttgaacttcctcactcgcagccagcgttatgaggtggctg

SEQ ID NO: 4082 - DNA, 60 bp, Artificial Sequence
  Probe
tgggcaggggacaggccacacagggttttataggccatgttaccaagtaccctaacttgg

SEQ ID NO: 4083 - DNA, 60 bp, Artificial Sequence
  Probe
ctgccagcactttcttcggcccctttcctatagggtcgggttctcccacttcagtcaaac

SEQ ID NO: 4084 - DNA, 60 bp, Artificial Sequence
  Probe
gaggtcactttgctgagcacaatcccatacccttcagcctctgctccacagagcctaagc

SEQ ID NO: 4085 - DNA, 60 bp, Artificial Sequence
  Probe
ttactcgctggcctggcctttcttctctctcctccctataccttgaacagggaacccagg

SEQ ID NO: 4086 - DNA, 60 bp, Artificial Sequence
  Probe
cttcctgtgccctgaatggggagtggcacctcttgagttttcagagggaggaagtatgcc

SEQ ID NO: 4087 - DNA, 60 bp, Artificial Sequence
  Probe
tatggaggaactgcttgctctcagcaagccaaaaacgggggcacgactctcttctctgtg

SEQ ID NO: 4088 - DNA, 60 bp, Artificial Sequence
  Probe
atcccatcagctctggccagaggcaggggagtcaccttgtaagtacttagggttgtcctt

SEQ ID NO: 4089 - DNA, 60 bp, Artificial Sequence
  Probe
tttcggaggggtccgaatctgggtgaaaatcaccacctctggcatctgcttttgggaaga

SEQ ID NO: 4090 - DNA, 60 bp, Artificial Sequence
  Probe
cagacacaccctcagtgaccacagccttccacactagtccacaaccaggaaaaagtggca

SEQ ID NO: 4091 - DNA, 60 bp, Artificial Sequence
  Probe
ctcctgctgcacatgtatgacagtgacaaggttcccgatgagcacttctccaccctgctg

SEQ ID NO: 4092 - DNA, 60 bp, Artificial Sequence
  Probe
tcttcctcctcatcaccatcgccctagggaccaagactgaatcctcctcacaaactgggg

SEQ ID NO: 4093 - DNA, 60 bp, Artificial Sequence
  Probe
ccgcgtcagcggattatggattactatgagaccaacagccagtgctccaagcccggaatt

SEQ ID NO: 4094 - DNA, 60 bp, Artificial Sequence
  Probe
ttgcaccgtcctcagcagtccacaaagcattttcatttctaatggcccatgggagccagg

SEQ ID NO: 4095 - DNA, 60 bp, Artificial Sequence
  Probe
acaggcagggagatgcaggtcatgcaggtcaatatacccatgaggagagagcaggaagga

SEQ ID NO: 4096 - DNA, 60 bp, Artificial Sequence
  Probe
ggagggaaagcaacctgaaggatccatctgctcccttctgctacactgcctcgatgcaag

SEQ ID NO: 4097 - DNA, 60 bp, Artificial Sequence
  Probe
ggacccattccttgccagtttggggggtctttagcggttgggaagtagctctcaaactct

SEQ ID NO: 4098 - DNA, 60 bp, Artificial Sequence
  Probe
atgcccaaagaggagagaggaagctctctttcccagatgccccagcaagtgtaaccttgc

SEQ ID NO: 4099 - DNA, 60 bp, Artificial Sequence
  Probe
taccaggtagctggggcctgtaggagtcagggttctctagagagacagaaccaacagggt

SEQ ID NO: 4100 - DNA, 60 bp, Artificial Sequence
  Probe
ccctcacatcactcagagagacttacaggagcagcatgagccttcctggggagagggaac

SEQ ID NO: 4101 - DNA, 60 bp, Artificial Sequence
  Probe
gaaggcaggcacggtctcacagctaacatttacagagcagtaagtgcagtgccaggctca

SEQ ID NO: 4102 - DNA, 60 bp, Artificial Sequence
  Probe
gtcctgctattggtctaggggatcagctagccttgccagtgtagggtgacaggctctctg

SEQ ID NO: 4103 - DNA, 60 bp, Artificial Sequence
  Probe
tggctcgggtgtctttggaactgtgcacaaaggagtgtggatccctgagggtgaatcaat

SEQ ID NO: 4104 - DNA, 60 bp, Artificial Sequence
  Probe
ccacagcagggatgggaactatagggtggacaaggcatttgccctgaaggtagtccacac

SEQ ID NO: 4105 - DNA, 60 bp, Artificial Sequence
  Probe
ttgtcaccagccagcctgggttcaaatgccgtttaagagctgtgatcgtctctgggtctc

SEQ ID NO: 4106 - DNA, 60 bp, Artificial Sequence
  Probe
gtaagccaggcccagttggaccagaactccctcctggacacatcccaattcaagtgatcc

SEQ ID NO: 4107 - DNA, 60 bp, Artificial Sequence
  Probe
ttacagagctgcaactcagttttggcggagcaaagtcctagaggtggccaaggacttccc

SEQ ID NO: 4108 - DNA, 60 bp, Artificial Sequence
  Probe
ctggtctgggggtcaaaggaattgctccctactcctatgcgggatgaggacaggtcttct

SEQ ID NO: 4109 - DNA, 60 bp, Artificial Sequence
  Probe
tgtggctttgcctggtccgctgtgacttcctttctacttgagccttgctaaggcagactc

SEQ ID NO: 4110 - DNA, 60 bp, Artificial Sequence
  Probe
agtgaaggaatcctgggtagagaccattctcaggtggttgggccaggctaaagactggga

SEQ ID NO: 4111 - DNA, 60 bp, Artificial Sequence
  Probe
tggtcagaacctaggaggcagtggcttgagactctgggtggaaaaggagactgtgagagc

SEQ ID NO: 4112 - DNA, 60 bp, Artificial Sequence
  Probe
cagagctctctgagtgactaaagcctggtacttgcaggccccaagaagacctacccaggt

SEQ ID NO: 4113 - DNA, 60 bp, Artificial Sequence
  Probe
ccatagctttagggctttgccagaactatgacgttgaggagggtggggtaaaggggcagg

SEQ ID NO: 4114 - DNA, 60 bp, Artificial Sequence
  Probe
gcaggtggaggcacagtgatgggaaaggtcaacgtgacttttggggagccaaacaaaagt

SEQ ID NO: 4115 - DNA, 60 bp, Artificial Sequence
  Probe
cctgtgccaggttttgaggttgggcaagggaaagagcattcagttgtgcttggaggaaca

SEQ ID NO: 4116 - DNA, 60 bp, Artificial Sequence
  Probe
ttttgcgcacagctgcttccagtatgccatccagaagaaatggccgctgtacatgagcac

SEQ ID NO: 4117 - DNA, 60 bp, Artificial Sequence
  Probe
tgcgatgggctcttcttggtgtctgtatggttgctgcaatgctggggtgaaaacaacacg

SEQ ID NO: 4118 - DNA, 60 bp, Artificial Sequence
  Probe
gatgttcagtcaaagaggaggatgagtgccttggcccaggaatcaggagcacacttgcct

SEQ ID NO: 4119 - DNA, 60 bp, Artificial Sequence
  Probe
ctggtgcctttgctccagccacttggaagagattagagtccccaaaccccacagagtcac

SEQ ID NO: 4120 - DNA, 60 bp, Artificial Sequence
  Probe
agtcccttccccaaagtcactcagctcataactggcagagccaaacctccaacctggttg

SEQ ID NO: 4121 - DNA, 60 bp, Artificial Sequence
  Probe
ttggggtctgctctaagctgcagcaagagaaactgtgtgtgaggggaagaggcctgtttc

SEQ ID NO: 4122 - DNA, 60 bp, Artificial Sequence
  Probe
acatgctgccccagttaatcagcaacctgactcaggccagtgtgtctctgaaacggatcc

SEQ ID NO: 4123 - DNA, 60 bp, Artificial Sequence
  Probe
cagagttggatgtgaccctgcagttgctcgaggacaagttcctccagaacaaggccttcc

SEQ ID NO: 4124 - DNA, 60 bp, Artificial Sequence
  Probe
ggatcagaggtccctggagtttctgcttcctccagagccagactactcactgctgctcac

SEQ ID NO: 4125 - DNA, 60 bp, Artificial Sequence
  Probe
tggcctggcattcaaaaccccttgtgttctctctaatctcatcagctcccactgcctccc

SEQ ID NO: 4126 - DNA, 60 bp, Artificial Sequence
  Probe
tgaatgaaaggagaaatgggagggcagcatgcgagggtgttgaagtcaaggggaggtctt

SEQ ID NO: 4127 - DNA, 60 bp, Artificial Sequence
  Probe
ggtgagagctttgagccacaccagcaatgtgatactgggtgagagctctggttcacgtgg

SEQ ID NO: 4128 - DNA, 60 bp, Artificial Sequence
  Probe
gtccctgctgcagacattgggagccatcatgattggcttgttgctgagcagaatccttgg

SEQ ID NO: 4129 - DNA, 60 bp, Artificial Sequence
  Probe
gagtcacagggtcaccacctttgacaacaggacatactgctgccgcttcaaggatggtgt

SEQ ID NO: 4130 - DNA, 60 bp, Artificial Sequence
  Probe
gggtagaaggagctcagcacctcttccagcccttaaagctgcagaaaaggtgtcacacgg

SEQ ID NO: 4131 - DNA, 60 bp, Artificial Sequence
  Probe
gatttccaagagcagcttgcagccttgctcacaggaaggcaccacgttgatgcagagttt

SEQ ID NO: 4132 - DNA, 60 bp, Artificial Sequence
  Probe
caattcctccggtacaccaaggcaagaaccccggaatacagaaagccctctgtccttgca

SEQ ID NO: 4133 - DNA, 60 bp, Artificial Sequence
  Probe
gccactccacgaccttactttgctggcatgagtgctggacagcaatttggcaacatcctc

SEQ ID NO: 4134 - DNA, 60 bp, Artificial Sequence
  Probe
atgttccagatcccagagtttgagccgagtgagcaggaagactccagctctgcagagagg

SEQ ID NO: 4135 - DNA, 60 bp, Artificial Sequence
  Probe
caccctgtacatcggcttcctgggcctcatcttctcctcgtactttgtgtacctggctga

SEQ ID NO: 4136 - DNA, 60 bp, Artificial Sequence
  Probe
gcacagcaaccagctctccatgcagtgtgtcaaggatgatgagctctacgaggaagtgcg

SEQ ID NO: 4137 - DNA, 60 bp, Artificial Sequence
  Probe
gcccaaaccctgctgccatcctggttgtcctcatcgtctctatggacaatcattccctcc

SEQ ID NO: 4138 - DNA, 60 bp, Artificial Sequence
  Probe
cttatgactcaaaggccctgaagggtttctgtagcctcccagccacagcccagaaaccat

SEQ ID NO: 4139 - DNA, 60 bp, Artificial Sequence
  Probe
atgttcgcccttcaccagcgggagcttgatatcccttgtctgtaacatagaccccgggta

SEQ ID NO: 4140 - DNA, 60 bp, Artificial Sequence
  Probe
tggggtaggaagtcttccatgactgtgcagtcgaaggaagtttcagcaaagcccatgggg

SEQ ID NO: 4141 - DNA, 60 bp, Artificial Sequence
  Probe
tccacacacaccacagacacacacacacccctcaacacaccatgccctttgtctctcttt

SEQ ID NO: 4142 - DNA, 60 bp, Artificial Sequence
  Probe
agttggggtccatgcctcctctctatgaatctgggaggactctgtcacggctttgaccag

SEQ ID NO: 4143 - DNA, 60 bp, Artificial Sequence
  Probe
agcaatggggctgggtggggtgaagattaggaagaggaaggagaatagaagctccaggga

SEQ ID NO: 4144 - DNA, 60 bp, Artificial Sequence
  Probe
agccatagcaccaagactgatgccagtagcactcaccatagcacggtacctcctctcacc

SEQ ID NO: 4145 - DNA, 60 bp, Artificial Sequence
  Probe
ccaggtagggacagaccaggatggcaactcaggtctattcactccagagactggcccttg

SEQ ID NO: 4146 - DNA, 60 bp, Artificial Sequence
  Probe
agtggtaggtaccctcaaaacgtgcaatggcttggagcagagcaacagggctcagaagac

SEQ ID NO: 4147 - DNA, 60 bp, Artificial Sequence
  Probe
acagtggtatacagtggcattaaggggtgaaaaggtggaagcagcgaggttgggtgcagt

SEQ ID NO: 4148 - DNA, 60 bp, Artificial Sequence
  Probe
cagatccagggactgggcacaaacatctgcctgttgagtaggaactgagctgtggccatt

SEQ ID NO: 4149 - DNA, 60 bp, Artificial Sequence
  Probe
tgctgtaccaagagtttgctcctggctgctttgatgtcagtgctgctactccacctctgc

SEQ ID NO: 4150 - DNA, 60 bp, Artificial Sequence
  Probe
tccttctccccatttctgtcccacaggccttcagccctttaacgtctctgccaaaaacca

SEQ ID NO: 4151 - DNA, 60 bp, Artificial Sequence
  Probe
aaacccctgccacaacggtggtttatgcgaggagatttcccaagaagtgcgaggagatgt

SEQ ID NO: 4152 - DNA, 60 bp, Artificial Sequence
  Probe
tcaaccgaatcggcaaggttggaaaccagaagcgtgttgttggtgtgcttttggggtcat

SEQ ID NO: 4153 - DNA, 60 bp, Artificial Sequence
  Probe
gaagcagcatcaacctaggagcagtgggccctggctctgtcactaaatggcagtgagatg

SEQ ID NO: 4154 - DNA, 60 bp, Artificial Sequence
  Probe
aacagcccacattggcctgctggataatgaaagcctttgaggtggaaaactcaggcaccc

SEQ ID NO: 4155 - DNA, 60 bp, Artificial Sequence
  Probe
ggctatcccagtggcttgttgggaggggtattttcagtccagacggtaggccttcctcta

SEQ ID NO: 4156 - DNA, 60 bp, Artificial Sequence
  Probe
ggagtcaggagactcagttccaccatagcatctgccgctcacatcccagatcactctggg

SEQ ID NO: 4157 - DNA, 60 bp, Artificial Sequence
  Probe
aaatgtgggcttcctttccttttgtttgggccacatcatcccttcccctccatctgtggc

SEQ ID NO: 4158 - DNA, 60 bp, Artificial Sequence
  Probe
aagtcgtttttgccacactgtggggtgttggggtcacgtgtttgcaggtttggggaatta

SEQ ID NO: 4159 - DNA, 60 bp, Artificial Sequence
  Probe
gtcgctgcatgcctgacaacaacttccacagcctctacgtcaagaggcaccagaatgtca

SEQ ID NO: 4160 - DNA, 60 bp, Artificial Sequence
  Probe
ccacagaagcaaagcattgctcatttgggtggttcccaacacagacacatggacgtgggt

SEQ ID NO: 4161 - DNA, 60 bp, Artificial Sequence
  Probe
acataacctgctggaaggcagggactccacttcagaaatcttggaaaaccctgtggccca

SEQ ID NO: 4162 - DNA, 60 bp, Artificial Sequence
  Probe
agctgggattcttcttcagagcttcaagcggggccaggcctttttatacccccactttga

SEQ ID NO: 4163 - DNA, 60 bp, Artificial Sequence
  Probe
tctcagtaggcacaaggccaaagtcagccgacttgcagattgtaatgccggttctcccac

SEQ ID NO: 4164 - DNA, 60 bp, Artificial Sequence
  Probe
tgggtctctgggctgtcagctctctggagaggaaaacagggtgaaggatctttgggtgat

SEQ ID NO: 4165 - DNA, 60 bp, Artificial Sequence
  Probe
gactcgggcttgtggtttatgtttatttgcccttggaggacgctgggttgggctgcattt

SEQ ID NO: 4166 - DNA, 60 bp, Artificial Sequence
  Probe
gcggcaacagatgctctcccgtttgcactacagctttcacggacaccattccaaaaaggg

SEQ ID NO: 4167 - DNA, 60 bp, Artificial Sequence
  Probe
caagcagacaggggacctgaagtggactctgagggatgatcccgtcatcgaaggaccaat

SEQ ID NO: 4168 - DNA, 60 bp, Artificial Sequence
  Probe
acgcgtcactcttctgcccaacttcatagcctcctcttgctggcctcctatctgtatgct

SEQ ID NO: 4169 - DNA, 60 bp, Artificial Sequence
  Probe
tgaaccccaccaacaccatcttcgacgccaagaggctgattggacggaaattcgaggatg

SEQ ID NO: 4170 - DNA, 60 bp, Artificial Sequence
  Probe
agacattttggtggtcacagctggggtggtagagtgtgctattggctaggggcttgaagc

SEQ ID NO: 4171 - DNA, 60 bp, Artificial Sequence
  Probe
ggggccttcattagggcggttagtttgaaggctgtcctggaagttggagagtgacatggg

SEQ ID NO: 4172 - DNA, 60 bp, Artificial Sequence
  Probe
atgagcacaaggactgaaccctggaccagttctaaggggtgtgatcagaccacacccaga

SEQ ID NO: 4173 - DNA, 60 bp, Artificial Sequence
  Probe
aacgtgatcgggctgctggacgtattcactcctgatgagaccctggatgacttcacggac

SEQ ID NO: 4174 - DNA, 60 bp, Artificial Sequence
  Probe
tcatgcagggaagttggaaatgggggctacatatgccctctcctccccgtctacaagagt

SEQ ID NO: 4175 - DNA, 60 bp, Artificial Sequence
  Probe
cccaagcaaacaatccagagcagctgtgcaaacaacggtgcataaatgaggcctcctgga

SEQ ID NO: 4176 - DNA, 60 bp, Artificial Sequence
  Probe
agccaggctactgcactgagcttcagcttctgtaaaactgaatggcgctgtgccagatca

SEQ ID NO: 4177 - DNA, 60 bp, Artificial Sequence
  Probe
ctggcctgcgttcacactgtttcagcataagcccattcctctcattcccctctcccacat

SEQ ID NO: 4178 - DNA, 60 bp, Artificial Sequence
  Probe
agcacactcccatcactacctgcctgcctatggaatgctgacaatcgaaagcctgaaggc

SEQ ID NO: 4179 - DNA, 60 bp, Artificial Sequence
  Probe
ggagaccgccaccttcctggacactttccactactatgatgccgatgacccggtccatta

SEQ ID NO: 4180 - DNA, 60 bp, Artificial Sequence
  Probe
tgcctggagctacagatgaccgttgccccactcaaccaggaaaagaaggcactgcattta

SEQ ID NO: 4181 - DNA, 60 bp, Artificial Sequence
  Probe
gagagcaagccattcaggtgactgatgctgctctgatccatccattggtgtcctctgggc

SEQ ID NO: 4182 - DNA, 60 bp, Artificial Sequence
  Probe
tgacaagagctgggaactaacgtgcctcaagcccccacaaggaccacagcattttctcat

SEQ ID NO: 4183 - DNA, 60 bp, Artificial Sequence
  Probe
gccctttttagggtctctggccaccagagccagctttactcacctgtgcatggcattcta

SEQ ID NO: 4184 - DNA, 60 bp, Artificial Sequence
  Probe
atgcacggagactcagaatacaacatcatgtttggtcccgacatctgtggccctggcacc

SEQ ID NO: 4185 - DNA, 60 bp, Artificial Sequence
  Probe
atgacagggtggggaactggagggtggggggattgaaatgcaagcaattagtggatcact

SEQ ID NO: 4186 - DNA, 60 bp, Artificial Sequence
  Probe
gggctgaaggaactgcacaaagagtttggaccatcccacttcagcgtgttggcttttccc

SEQ ID NO: 4187 - DNA, 60 bp, Artificial Sequence
  Probe
agaaggccaagccgcgcatcttcttcctctttaacgacatcctggtgtatggcagcatcg

SEQ ID NO: 4188 - DNA, 60 bp, Artificial Sequence
  Probe
cctgtctttgtctctgatgggctttgggaacagacagcatcctgggcagaatggtcccat

SEQ ID NO: 4189 - DNA, 60 bp, Artificial Sequence
  Probe
acagtggaagtttgaacagtggagactgtgggagcccagtgcccagagcaacctactcta

SEQ ID NO: 4190 - DNA, 60 bp, Artificial Sequence
  Probe
gtgtgtcaaagctaaacaggctgggtgggcatgagcaagtcagctggttcattcagcagc

SEQ ID NO: 4191 - DNA, 60 bp, Artificial Sequence
  Probe
gccgggagaaacaagcacggacgcaaacacgaacttctcacaaaagccctgcatttgcta

SEQ ID NO: 4192 - DNA, 60 bp, Artificial Sequence
  Probe
caccaaacgaatggctgcagtctgtccaggccaccatgatcctgtcgatcatcttcagca

SEQ ID NO: 4193 - DNA, 60 bp, Artificial Sequence
  Probe
acaagctcagcagctccaaggagaagcccttcatcagatgcaagcgttatatggccagca

SEQ ID NO: 4194 - DNA, 60 bp, Artificial Sequence
  Probe
tgtggaacagggaaagctgatgcctgtgttttggtcaaccccattctctcctggcactct

SEQ ID NO: 4195 - DNA, 60 bp, Artificial Sequence
  Probe
acccgaaagaaccgccaagtgtgtgccaacccagagaagaaatgggttcgggagtacatc

SEQ ID NO: 4196 - DNA, 60 bp, Artificial Sequence
  Probe
ttcctcaccacagaggttcctgaggtcacagtgttttccaagtctcccgtgacactgggt

SEQ ID NO: 4197 - DNA, 60 bp, Artificial Sequence
  Probe
tcccttcctgcccctcctcagaagcttcatgcccttctcaccatgtctcacctactgatg

SEQ ID NO: 4198 - DNA, 60 bp, Artificial Sequence
  Probe
gggaagaatgagctgggccattgtgaagggaaactccaggaagctgggtcttcactgagg

SEQ ID NO: 4199 - DNA, 60 bp, Artificial Sequence
  Probe
tggcttctgattctcattcaggcttctcacggcattcagcagcagcgttgctgtaaccga

SEQ ID NO: 4200 - DNA, 60 bp, Artificial Sequence
  Probe
ggggccttcacctgctccatccagaacatcagcttctcctccttcactcttcagagagct

SEQ ID NO: 4201 - DNA, 60 bp, Artificial Sequence
  Probe
acaacccgtctttcagaaaagcggcgtgacagggaaaacagcgaacagctctaaggggaa

SEQ ID NO: 4202 - DNA, 60 bp, Artificial Sequence
  Probe
cctgtaggtctttgcctgctgagggcaggggtttgtgtaatggttatggttccggacagg

SEQ ID NO: 4203 - DNA, 60 bp, Artificial Sequence
  Probe
ggggccgtttagcctaatggtgaaatgcttagtcaactggaacctgactgcctggctcca

SEQ ID NO: 4204 - DNA, 60 bp, Artificial Sequence
  Probe
atacagagcagcagagcaaggcagttctgtgaagtttgtccctggcagcccttagcagtg

SEQ ID NO: 4205 - DNA, 60 bp, Artificial Sequence
  Probe
gctgggaccccgtttcatccatccatgcttcctagaacacacgatgggctttccttaccc

SEQ ID NO: 4206 - DNA, 60 bp, Artificial Sequence
  Probe
gtcaccaccgacccagcccctcaacagcaagttggttcttcagcattaagatccaggtgt

SEQ ID NO: 4207 - DNA, 60 bp, Artificial Sequence
  Probe
accagacagtgacactagtctgcaacacacccaatgaggcacccagtgatctccgctaca

SEQ ID NO: 4208 - DNA, 60 bp, Artificial Sequence
  Probe
atgtttttgggttggtccagaaaagcctctgtggggagagaacacaggagttggacggca

SEQ ID NO: 4209 - DNA, 60 bp, Artificial Sequence
  Probe
tgcccaatgaaaagtatggtcagcgagcgaaggtttgcaaggagacagacgagggcgaaa

SEQ ID NO: 4210 - DNA, 60 bp, Artificial Sequence
  Probe
caaccggcggcggctgccgcagagcagcgttcggttttgtttttaaattttgaaaactgt

SEQ ID NO: 4211 - DNA, 60 bp, Artificial Sequence
  Probe
ctggggaagtgaccagggtggaagatagagacttgtgtccatagggttcaggaaggcggg

SEQ ID NO: 4212 - DNA, 60 bp, Artificial Sequence
  Probe
aacccctgtggacgacccgatgagcctgctatacaacatgaacgactgctactccaagct

SEQ ID NO: 4213 - DNA, 60 bp, Artificial Sequence
  Probe
gaatgagtgtcccacgggcctggtggacgaagacaccttcaaactcatttacgcgcagtt

SEQ ID NO: 4214 - DNA, 60 bp, Artificial Sequence
  Probe
cacagacgttagcccccgttcgtgtttttgttctgagaaaggtaggccagcttgcctgga

SEQ ID NO: 4215 - DNA, 60 bp, Artificial Sequence
  Probe
gctctccctatgttgcttaggctggcctcaaactgctggtttcgaactcctggcctgaag

SEQ ID NO: 4216 - DNA, 60 bp, Artificial Sequence
  Probe
ggcagcacttcccaaccttcctgacatgggcgtttctgtgaactccagtgtgatggagaa

SEQ ID NO: 4217 - DNA, 60 bp, Artificial Sequence
  Probe
cgtggaccaggctctgaaggagtttggcagaatcgacattctcattaactgtgcggccgg

SEQ ID NO: 4218 - DNA, 60 bp, Artificial Sequence
  Probe
cgtctgctttatgcccttccacatctgtttcgctttcctgatgctgggaacgggggagaa

SEQ ID NO: 4219 - DNA, 60 bp, Artificial Sequence
  Probe
aagaccgaactggtttcgctgtcattcatgatgcggccagagcaggtttcctggacactt

SEQ ID NO: 4220 - DNA, 60 bp, Artificial Sequence
  Probe
actcaacccagacagatggttagctccccgacaggacttaagcaagtgggccagtctctg

SEQ ID NO: 4221 - DNA, 60 bp, Artificial Sequence
  Probe
tcacttcctggtgggcgttagacacataccctgctgagcagatcagctaggaaaagccct

SEQ ID NO: 4222 - DNA, 60 bp, Artificial Sequence
  Probe
gaaatgccactccttacccagtgctctgcaacaagtcctgtctgacccccaattccctcc

SEQ ID NO: 4223 - DNA, 60 bp, Artificial Sequence
  Probe
tcctcagcttcccctctgcctccaaacaggggacacttcgggaatgctgaactaatgaga

SEQ ID NO: 4224 - DNA, 60 bp, Artificial Sequence
  Probe
tactttgggggaatgagtatccttggttctgccctgtgagggagtcgtgtgtccctgctc

SEQ ID NO: 4225 - DNA, 60 bp, Artificial Sequence
  Probe
tctgtcgccgtttgtcctgggtgaggtcattctggtcatctgtggcaggaggactacaaa

SEQ ID NO: 4226 - DNA, 60 bp, Artificial Sequence
  Probe
gaggcagacatctgggaaaagtccagctggggcaagcatttgaagtctgccttcctacca

SEQ ID NO: 4227 - DNA, 60 bp, Artificial Sequence
  Probe
ggatctgaggagatctcaggagcacagagtgggtgcttggtggcagaggtactgctgttc

SEQ ID NO: 4228 - DNA, 60 bp, Artificial Sequence
  Probe
gcagcaaagtgtgtgccactcattctggtctacccttggtccctcagccacaaccctaag

SEQ ID NO: 4229 - DNA, 60 bp, Artificial Sequence
  Probe
tggatgggagaacagcttaaaagccatccttcccaaagccttgcctctgtctggacaccc

SEQ ID NO: 4230 - DNA, 60 bp, Artificial Sequence
  Probe
tagcatctctgtcctgtgttgagttgtggttgcccgtcactgggctgtaaagtgccttgc

SEQ ID NO: 4231 - DNA, 60 bp, Artificial Sequence
  Probe
gggccccatctcaccaaccaactatcggcagaggatgcaccagtttctctatgaggagga

SEQ ID NO: 4232 - DNA, 60 bp, Artificial Sequence
  Probe
ctgcaaggcccaccttctagtcggtgtgtaattgctggacagggagttgcttggaccaaa

SEQ ID NO: 4233 - DNA, 60 bp, Artificial Sequence
  Probe
gaagagctccgcggagtacagagcccattttctagctgtgtccactgaggctgaacggat

SEQ ID NO: 4234 - DNA, 60 bp, Artificial Sequence
  Probe
tggcctgcaactgtaccctctggagtgggaagcaggcagaaagccctatacttaactgga

SEQ ID NO: 4235 - DNA, 60 bp, Artificial Sequence
  Probe
ctggacgaggatctcttcagaggaaggcattactgggtaccggccaagaggctgtttggt

SEQ ID NO: 4236 - DNA, 60 bp, Artificial Sequence
  Probe
tggctccattggctcaggtggtttagtcattgggaaccagcatcatctgtggcactccag

SEQ ID NO: 4237 - DNA, 60 bp, Artificial Sequence
  Probe
atggagtggctgccatggaaggaagaaaagctgccatttcccttctggacactgagaggg

SEQ ID NO: 4238 - DNA, 60 bp, Artificial Sequence
  Probe
ttcaccgcctcacctactaaatcaggctctccggaaagggtaaggcccaggaatctgcat

SEQ ID NO: 4239 - DNA, 60 bp, Artificial Sequence
  Probe
cagaccggctctaaaggcctaaggggaggactggtgtaagtcctgaagtccaaaggccaa

SEQ ID NO: 4240 - DNA, 60 bp, Artificial Sequence
  Probe
acgcctctgcaactctgcctctgataatgcatcacagtgctgccgagtgtctaccagtct

SEQ ID NO: 4241 - DNA, 60 bp, Artificial Sequence
  Probe
aaggactggggaaacagctgtaacatttgccaccctcagaagctgctggtcctgtgtcac

SEQ ID NO: 4242 - DNA, 60 bp, Artificial Sequence
  Probe
cggcttgaccaatgacctatgtcacaagaggtggcgtgtaaggaatgcagccccctgaag

SEQ ID NO: 4243 - DNA, 60 bp, Artificial Sequence
  Probe
ccccagagctaaatcaagtacatcccagcccaaaggcccctcccaacactcatcattgca

SEQ ID NO: 4244 - DNA, 60 bp, Artificial Sequence
  Probe
taggcagtccttctggtgatcctattccattccctcctgctgcggtttctcttggcctgt

SEQ ID NO: 4245 - DNA, 60 bp, Artificial Sequence
  Probe
aggcctttgctttctgctccatgctgtgcctcatcaactccatggtcaaccctgtcatct

SEQ ID NO: 4246 - DNA, 60 bp, Artificial Sequence
  Probe
gacctcctgagggatttgggggaggatggggatttgacagaaagaggccagaactggaga

SEQ ID NO: 4247 - DNA, 60 bp, Artificial Sequence
  Probe
gtaggagcctctctccctactgctgctacacaagaccctgagactgacctgcaggacgaa

SEQ ID NO: 4248 - DNA, 60 bp, Artificial Sequence
  Probe
tgaaaccagacaggaaccaagccatctgctcccggaacagtgctctgccattgcactaag

SEQ ID NO: 4249 - DNA, 60 bp, Artificial Sequence
  Probe
gctgagtgaacagggtgccaccagagtgtgggtatggcagtaggtagtcagtagctgtgg

SEQ ID NO: 4250 - DNA, 60 bp, Artificial Sequence
  Probe
aacagagctccttggacccttccctctaaggtctctggaaatgggaaaccctgcagaggg

SEQ ID NO: 4251 - DNA, 60 bp, Artificial Sequence
  Probe
ctttgctaccctcgccaccactgtcctatactgcctggtgtttctcctcagcctagtggg

SEQ ID NO: 4252 - DNA, 60 bp, Artificial Sequence
  Probe
aatgggtggagacattcccaagtgcctgtcctcattggctatggggaggcaaagttcgtg

SEQ ID NO: 4253 - DNA, 60 bp, Artificial Sequence
  Probe
cacatgacaacttcccacccagtcctctgctttgttctccaggccacttagcaagcccat

SEQ ID NO: 4254 - DNA, 60 bp, Artificial Sequence
  Probe
tttgcagagctgagctagccagcaaagtcgggttctcagtggggagaggatcatctctgg

SEQ ID NO: 4255 - DNA, 60 bp, Artificial Sequence
  Probe
ttcttcctggagctctttctgttggtgcacttgaggtttcaagccgcctgtgtgtccagg

SEQ ID NO: 4256 - DNA, 60 bp, Artificial Sequence
  Probe
ccatgccaggcctccagaccattaacctcagtgcattgggtacttcaggaatccaggtgc

SEQ ID NO: 4257 - DNA, 60 bp, Artificial Sequence
  Probe
acatcctcaagtaagtaccgcccctgggactgtagatccccctgctttgggtcaactgtg

SEQ ID NO: 4258 - DNA, 60 bp, Artificial Sequence
  Probe
tgaaagcttccggaattgactgtgaccacttggatgtcaccactgtcagcccctgccttg

SEQ ID NO: 4259 - DNA, 60 bp, Artificial Sequence
  Probe
tgagccaggattcctgcttctgagccaggcagtggtcagagtcccataaactgtgtgtct

SEQ ID NO: 4260 - DNA, 60 bp, Artificial Sequence
  Probe
gtcctcgttccagtttcactgatgacctctcgaccagctccctcacagcagtctttgcca

SEQ ID NO: 4261 - DNA, 60 bp, Artificial Sequence
  Probe
gcctgcctgtgtcatggcctcagccctgatgtcatctttccatgagaaagatgtgtggct

SEQ ID NO: 4262 - DNA, 60 bp, Artificial Sequence
  Probe
attgggtgtttcctgcagctccaggggttgctgagataaggaatacaaagcccccagctt

SEQ ID NO: 4263 - DNA, 60 bp, Artificial Sequence
  Probe
atccctccccatcacaaggttcttaatcacagctgccgaatccccttttgccacggaagg

SEQ ID NO: 4264 - DNA, 60 bp, Artificial Sequence
  Probe
tctcgcttctgcaagaccacgaacacagtggagcctctgagggggaatctggtgaagaag

SEQ ID NO: 4265 - DNA, 60 bp, Artificial Sequence
  Probe
aatatttgcgggcgtgaagcggcccgaggtgataccacaagtcttttgacatgctgaggt

SEQ ID NO: 4266 - DNA, 60 bp, Artificial Sequence
  Probe
accttgtgccttggaaatgcaaactcaccgctccaatgcctactgagtagggggagcaaa

SEQ ID NO: 4267 - DNA, 60 bp, Artificial Sequence
  Probe
agtaccccaggcatgcagagcctgctgcaacagataactgaaaacccccagctgattcag

SEQ ID NO: 4268 - DNA, 60 bp, Artificial Sequence
  Probe
tcttgacaggtaggtggcaaaggctctggaagggccagaacatcactgcagccatgtttt

SEQ ID NO: 4269 - DNA, 60 bp, Artificial Sequence
  Probe
tggcttttcttcctgactgcaatgtggcattgtgccagctacctcctctttctcggcctc

SEQ ID NO: 4270 - DNA, 60 bp, Artificial Sequence
  Probe
gtagttggggtccattgattgtgcaggggaacgtgcaggaggtttttctaggcaccgtgt

SEQ ID NO: 4271 - DNA, 60 bp, Artificial Sequence
  Probe
acactcacacccacactctcaccccatgtactcacacccatgcactcacacactgtcaca

SEQ ID NO: 4272 - DNA, 60 bp, Artificial Sequence
  Probe
agccacctgcactaaccagttcatggactgaatggccaagcagtgcatgcagccaaaaag

SEQ ID NO: 4273 - DNA, 60 bp, Artificial Sequence
  Probe
tgggagggagagtcagtcagtgatgtgtttgagctgctgtgtccacctggaaaccatcgt

SEQ ID NO: 4274 - DNA, 60 bp, Artificial Sequence
  Probe
caggagttggcccctctccttttgctacaaatccttgccttgcaaaggggaggtgaggat

SEQ ID NO: 4275 - DNA, 60 bp, Artificial Sequence
  Probe
ggaaggtggctgagagccacctgcccggtgagtcctctattcagttctgtcctcacaatc

SEQ ID NO: 4276 - DNA, 60 bp, Artificial Sequence
  Probe
tgaaccaaacaggaacccaaacccccagctgctctgacaccaaggacttccctaagcatg

SEQ ID NO: 4277 - DNA, 60 bp, Artificial Sequence
  Probe
gacatttcctctgctgccaaacccatggcactctgaggctgactgtgtccacctcattcc

SEQ ID NO: 4278 - DNA, 60 bp, Artificial Sequence
  Probe
tgaggggtaacctttcctccagtgaatagaagcccagagcaccactcggatggagccaac

SEQ ID NO: 4279 - DNA, 60 bp, Artificial Sequence
  Probe
aggtcaggaggcagtaaggtggcttgagagtttgtgtgcagccaggactaatagccaggt

SEQ ID NO: 4280 - DNA, 60 bp, Artificial Sequence
  Probe
catcatccctctaggaatgggcctgccttggtgtccttgtcatgcaaagtcactggctgg

SEQ ID NO: 4281 - DNA, 60 bp, Artificial Sequence
  Probe
ggcaccagaaggtatgaagggccttggagtactgggctttcttatggctgcgagagagga

SEQ ID NO: 4282 - DNA, 60 bp, Artificial Sequence
  Probe
gcttgctagggggaaatattcgtctcctgttgtgtggtggcgctccactttctgcaacca

SEQ ID NO: 4283 - DNA, 60 bp, Artificial Sequence
  Probe
gacccctcaacagcagggccatctccccctggagatatgagttggacagagacttgaacc

SEQ ID NO: 4284 - DNA, 60 bp, Artificial Sequence
  Probe
gaagcacttctgtcccaatgtgcccatcatcctggtggccaacaaaaaagacctgcgcag

SEQ ID NO: 4285 - DNA, 60 bp, Artificial Sequence
  Probe
accacaggaagtgcactgaccactggaggcataaaagaggtcctcaaagagcccgatcct

SEQ ID NO: 4286 - DNA, 60 bp, Artificial Sequence
  Probe
atggattctgggaatggccagaaaaacaaatgcctgtggttgtgagcagtgcccacaccc

SEQ ID NO: 4287 - DNA, 60 bp, Artificial Sequence
  Probe
acttgtcatggtgaaatggcaaatctgggcttcctgtggttccagaagcctgcgactgga

SEQ ID NO: 4288 - DNA, 60 bp, Artificial Sequence
  Probe
atccatgcccacctttggcatgagctgagggttattgcttctcagggcttccttttccct

SEQ ID NO: 4289 - DNA, 60 bp, Artificial Sequence
  Probe
aaggacgtccattggaaacgccggacttgggagagaggatcaggctaccagttggatgtt

SEQ ID NO: 4290 - DNA, 60 bp, Artificial Sequence
  Probe
tgacccggccctgtagctacagcaagaagtcccactttgactttgaggaggaagacgtgg

SEQ ID NO: 4291 - DNA, 60 bp, Artificial Sequence
  Probe
gcaacagaattggcatcctccaggcacttgttagaaatgcaaaatccccggcccccttcc

SEQ ID NO: 4292 - DNA, 60 bp, Artificial Sequence
  Probe
ggtgagagacaaaggagacacaggcagagagatgtggacagcacagcccacagacacaca

SEQ ID NO: 4293 - DNA, 60 bp, Artificial Sequence
  Probe
ctgcccacacttgtttcctggcctaagggctttttctggtcactgaggcattttgcctgc

SEQ ID NO: 4294 - DNA, 60 bp, Artificial Sequence
  Probe
tgctcatctacatcaggctcagcaaagcaggctcctagaaccaaggaagtccctccccac

SEQ ID NO: 4295 - DNA, 60 bp, Artificial Sequence
  Probe
caaaaggatcaacatggcccatctctgcattgtcggttcccatgctgtgaatggcgtggc

SEQ ID NO: 4296 - DNA, 60 bp, Artificial Sequence
  Probe
ggagagattcagggtagagcttcgagctgacttccacgtggccagtttgtggtcagcgag

SEQ ID NO: 4297 - DNA, 60 bp, Artificial Sequence
  Probe
gtgagtcagcagaagtgtccattgtggactgcatcttagcccgagtaggggctggtgaca

SEQ ID NO: 4298 - DNA, 60 bp, Artificial Sequence
  Probe
tgggtctccttgtattccatcaccctccacagagtgtggcctccagcagatgttcagtgg

SEQ ID NO: 4299 - DNA, 60 bp, Artificial Sequence
  Probe
tcttggggcctctatttatctgtcagggtctccgatgggagggtctccgaacctgaggtc

SEQ ID NO: 4300 - DNA, 60 bp, Artificial Sequence
  Probe
tctccaaagctgccgattggtgactgaatgcagctttggaccatgccctgacactgcata

SEQ ID NO: 4301 - DNA, 60 bp, Artificial Sequence
  Probe
gccaaccgaatcgccaaaggaaccttcaaggtggatgggaaggagtatcacctggccatt

SEQ ID NO: 4302 - DNA, 60 bp, Artificial Sequence
  Probe
aacctgttcccctctgctactagccactgagaagtgcactttaagaggtgggagctgggc

SEQ ID NO: 4303 - DNA, 60 bp, Artificial Sequence
  Probe
tggaggggaagatcagtctggttttggtccgggtacttttgagcagcctgtgagacctcc

SEQ ID NO: 4304 - DNA, 60 bp, Artificial Sequence
  Probe
atggcaaggaaccatcccgtggcataaacccagatgaagctgtagcgtatggtgctgctg

SEQ ID NO: 4305 - DNA, 60 bp, Artificial Sequence
  Probe
gggatttgtgggagtcttgtagtcccagcgttgtgtaggagtggcctcactgtgctctgt

SEQ ID NO: 4306 - DNA, 60 bp, Artificial Sequence
  Probe
gcctttccatggagactcgtaagcagcttcatctgacacgggcatccctggcttgctttt

SEQ ID NO: 4307 - DNA, 60 bp, Artificial Sequence
  Probe
agctgctgtgcctgatgtccggacagccctgctcgaagatatagaaagagtgacctgcac

SEQ ID NO: 4308 - DNA, 60 bp, Artificial Sequence
  Probe
cagatgaggaacctggacccagttggctcaagtccatgcaggaaatgtgggggaaaccag

SEQ ID NO: 4309 - DNA, 60 bp, Artificial Sequence
  Probe
ccctttcaccctggtgttggcctccatcagctgtgtctggattctgacagtctctcctgt

SEQ ID NO: 4310 - DNA, 60 bp, Artificial Sequence
  Probe
tcccacgaacaccacgaacctcaccctcaccattaaccacataccagacatctccccagc

SEQ ID NO: 4311 - DNA, 60 bp, Artificial Sequence
  Probe
ggaacaagatcaacctcctcggcttcttgggccttgtccactgccttccctgcaaagatt

SEQ ID NO: 4312 - DNA, 60 bp, Artificial Sequence
  Probe
actcctgccaaccttccctcatccactgtgctcctatcataccagccgcctttcaatcct

SEQ ID NO: 4313 - DNA, 60 bp, Artificial Sequence
  Probe
gtaggtgagggcaggagaagaaaggctgtcatcctgcccatcttgggaagatagccctcc

SEQ ID NO: 4314 - DNA, 60 bp, Artificial Sequence
  Probe
tgggcttggctgttttctgtgcactgaggtcaagtggaattgcttgctgtgctttgcgtt

SEQ ID NO: 4315 - DNA, 60 bp, Artificial Sequence
  Probe
acctttgcccctgactttctccatggaccacggacaagtgacttgatctccctgagctgt

SEQ ID NO: 4316 - DNA, 60 bp, Artificial Sequence
  Probe
atcccttcctggagactaaacctggtgctcaggagcgaaggactgtgaacttgtggcctg

SEQ ID NO: 4317 - DNA, 60 bp, Artificial Sequence
  Probe
accgcggtgttcctgtggccataaagcaagtgaacaagtgcaccaagaaccgactagcat

SEQ ID NO: 4318 - DNA, 60 bp, Artificial Sequence
  Probe
acaaggagtggcatgagtgcatgaccctggacgacctagaacaacttagggggaaggcat

SEQ ID NO: 4319 - DNA, 60 bp, Artificial Sequence
  Probe
agcatgagccccgaagggcagaactgtgagtcaaaaccatgtgtgtcatggaatgctggt

SEQ ID NO: 4320 - DNA, 60 bp, Artificial Sequence
  Probe
gcaaaggaatagacttgcagagctagcaatgaaaagggggcctggactgtcaggggccag

SEQ ID NO: 4321 - DNA, 60 bp, Artificial Sequence
  Probe
agcatgctggggaccgtcctctgggtaaacagaccacaaagaaggtcttgaaggaggagg

SEQ ID NO: 4322 - DNA, 60 bp, Artificial Sequence
  Probe
ggagccaggcgttcaccttggtcgtcctgatgttttacctcagactccacctttggagga

SEQ ID NO: 4323 - DNA, 60 bp, Artificial Sequence
  Probe
tgcttcctcttcctttgaagcatcatcagtagtcacaccctcacagctggcctgccctct

SEQ ID NO: 4324 - DNA, 60 bp, Artificial Sequence
  Probe
aagccttcaaaggccaggcagccaccgtaataagagaaagccactgcttctgccatgaca

SEQ ID NO: 4325 - DNA, 60 bp, Artificial Sequence
  Probe
ccagctcctggtacttcctcaggtattggtgctctggctattgctcacttcccagcctcc

SEQ ID NO: 4326 - DNA, 60 bp, Artificial Sequence
  Probe
aagctctgcttctggaagagcaagggctcccctctccctttcatgcagtttctaggagca

SEQ ID NO: 4327 - DNA, 60 bp, Artificial Sequence
  Probe
aagctcaagggcatgccaggcaaaggccttttttctggcagcttgaacttgtctcagcag

SEQ ID NO: 4328 - DNA, 60 bp, Artificial Sequence
  Probe
atgacctgggatgcctaactgtctactccctgcaagcctcagagcagccaagtcattggt

SEQ ID NO: 4329 - DNA, 60 bp, Artificial Sequence
  Probe
ttccgtgatttgcttgcttcacactgtggtagcctggccacgaaagaaccaggattcccg

SEQ ID NO: 4330 - DNA, 60 bp, Artificial Sequence
  Probe
tcgtgtgatgtgtgtgctgcctttggctgagtgtgtggagtcctgctcaggtgttaggta

SEQ ID NO: 4331 - DNA, 60 bp, Artificial Sequence
  Probe
aatgctgagctgtaccccacattcgtcaggaacctcggagtgatggtgtgttcctccctg

SEQ ID NO: 4332 - DNA, 60 bp, Artificial Sequence
  Probe
gggatgagctcagggtttaggcacacagctcaggatgtatacggaggctacactgctgcc

SEQ ID NO: 4333 - DNA, 60 bp, Artificial Sequence
  Probe
tcagccacagagagggggccgaatgggttgctgtttttgcagttgaatgcaaacgctttt

SEQ ID NO: 4334 - DNA, 60 bp, Artificial Sequence
  Probe
accatgcgtaagagcagtttgtctgcagtggtgcaggacgtaaacacagggcacttgtgg

SEQ ID NO: 4335 - DNA, 60 bp, Artificial Sequence
  Probe
acgtcacttactccccactctgtcatccttctatctgcagtatcccacccgcaggacgct

SEQ ID NO: 4336 - DNA, 60 bp, Artificial Sequence
  Probe
tatcaccgaggacagctgctctgattctgaagtgtgaacgcctgcgtacggctgatgctg

SEQ ID NO: 4337 - DNA, 60 bp, Artificial Sequence
  Probe
attatgagcctccatttggttccaaggtgcgggagcacccctgtgtcgaaagcatgaagg

SEQ ID NO: 4338 - DNA, 60 bp, Artificial Sequence
  Probe
attttgcatctcaggtcacccgatgacccgtgcctttatcacccatgctggttcccatgg

SEQ ID NO: 4339 - DNA, 60 bp, Artificial Sequence
  Probe
cagccctaggaaacacatgcagtgagggaggtacagcaaaggcgtcattaagccaaccgc

SEQ ID NO: 4340 - DNA, 60 bp, Artificial Sequence
  Probe
aatcaccatggccaaccctcaatgcaaagaggatgagaaatgtggtccagccctgggagg

SEQ ID NO: 4341 - DNA, 60 bp, Artificial Sequence
  Probe
tcagaagttctggagcccagacttgtgacgggtgggaatggagaatggttggttgggact

SEQ ID NO: 4342 - DNA, 60 bp, Artificial Sequence
  Probe
tggctttgcttcccactgggattcctacttaggtgtctgccctcaggggtccaaatcact

SEQ ID NO: 4343 - DNA, 60 bp, Artificial Sequence
  Probe
tcatccgcttctccaaatctctgggcctccctgaaaaccacatcgtcttccctgtcccaa

SEQ ID NO: 4344 - DNA, 60 bp, Artificial Sequence
  Probe
aggatgagggcacacaaggaaagacaaggtggtgcttggtgtgtctggggaaacagcaag

SEQ ID NO: 4345 - DNA, 60 bp, Artificial Sequence
  Probe
ccaaggctgagccactccaagctgaggatgatccactgcaggcaaaagcttatgaggctg

SEQ ID NO: 4346 - DNA, 60 bp, Artificial Sequence
  Probe
aatctccagtggcatctgcaatgtgggtattctagcctccagtgctcacgtggctcacct

SEQ ID NO: 4347 - DNA, 60 bp, Artificial Sequence
  Probe
aggttggacagaggcagttgggagttcaggagagagtccatggtggaagcgtgcttttga

SEQ ID NO: 4348 - DNA, 60 bp, Artificial Sequence
  Probe
ggagacgtccaccaatcccattgcttccatttttgcctggaccagagggttagcccacag

SEQ ID NO: 4349 - DNA, 60 bp, Artificial Sequence
  Probe
gccaatgacgacacagaccagcaaagcagaaccgagactgtccgcacttggttcggaaac

SEQ ID NO: 4350 - DNA, 60 bp, Artificial Sequence
  Probe
acccacacagagtgtcatgggtgacagtttctggttgaagtagctccacgcctggcttct

SEQ ID NO: 4351 - DNA, 60 bp, Artificial Sequence
  Probe
ggaacaaatggaagagtgccggtgctgagacccttgaagtgcatccctgcgagcaagaag

SEQ ID NO: 4352 - DNA, 60 bp, Artificial Sequence
  Probe
gacctatgctgtggtggagcgatggctgaaggagctctatgaccatgctgaagccacgat

SEQ ID NO: 4353 - DNA, 60 bp, Artificial Sequence
  Probe
ctcgtaaggagcacagcctagttcccttgcgtgcacagttcacaatagggttcggctcct

SEQ ID NO: 4354 - DNA, 60 bp, Artificial Sequence
  Probe
aaaccagctcactgactgacaggcagccactctccaaagagtccctgaaccatgctctcg

SEQ ID NO: 4355 - DNA, 60 bp, Artificial Sequence
  Probe
tgccctgatgggctacgccacccacaagtatctcgatagtgaggaggatgaggagtagcc

SEQ ID NO: 4356 - DNA, 60 bp, Artificial Sequence
  Probe
cacacctccacctccaccaatgcactcttcttcctcctccttctccagacaactgctggg

SEQ ID NO: 4357 - DNA, 60 bp, Artificial Sequence
  Probe
atgaacagccaagtgttaaggtgttgaaccacttggcccccattctgatggcagcaggga

SEQ ID NO: 4358 - DNA, 60 bp, Artificial Sequence
  Probe
aatgggcacaggggaagcagagatataggtgaggacagatcaaggtggacttgggcagcc

SEQ ID NO: 4359 - DNA, 60 bp, Artificial Sequence
  Probe
acaaggaaggcacatcctggctgaccaagaggttagactgtgctcgggcactgacaagaa

SEQ ID NO: 4360 - DNA, 60 bp, Artificial Sequence
  Probe
tgtcggaaggctgcaaaatccttgatcaagctgggtttggagcgtttccacggagttggt

SEQ ID NO: 4361 - DNA, 60 bp, Artificial Sequence
  Probe
atcctcgctgtggttggactgagtctctgtattgcggcgtgtataccaatgcatggccct

SEQ ID NO: 4362 - DNA, 60 bp, Artificial Sequence
  Probe
cagcaccttcatggacggctacacaggagagtttgacaccttcctctaccagctgccagg

SEQ ID NO: 4363 - DNA, 60 bp, Artificial Sequence
  Probe
tgtttctgtgggtgagagatgtgttgctgtgcccacccagtacagcttcctcctctgacc

SEQ ID NO: 4364 - DNA, 60 bp, Artificial Sequence
  Probe
tcccgcctgttttctttctgactctatctggcagcccgatgccacccagtacaggaagtg

SEQ ID NO: 4365 - DNA, 60 bp, Artificial Sequence
  Probe
cctgggacgtgactttcgaaagtgcttctcagcatccattcccccctcccctccacttag

SEQ ID NO: 4366 - DNA, 60 bp, Artificial Sequence
  Probe
tcctccaagcatctctagcacagagaccctgttttctccccttgtaatgggccagtgccc

SEQ ID NO: 4367 - DNA, 60 bp, Artificial Sequence
  Probe
cggagctgggtatctcaaatctgctttcatccagccactgcccaaagccatcttcctgcc

SEQ ID NO: 4368 - DNA, 60 bp, Artificial Sequence
  Probe
atgtggcccggatcagctggtacctccgtgacatcatcactcgataccaggagaccttca

SEQ ID NO: 4369 - DNA, 60 bp, Artificial Sequence
  Probe
aggatggcaggtttgggcagagagaaaagttgggtggcagtgcagtcatcacacaaccaa

SEQ ID NO: 4370 - DNA, 60 bp, Artificial Sequence
  Probe
gcgcggagttcgtgagcgagaaggaagttaaacctcgcggaatagactggcatttcggga

SEQ ID NO: 4371 - DNA, 60 bp, Artificial Sequence
  Probe
aaatgcctagggagagctgtgaaaagtcatcatcctgccagcagcactcctcccgttcct

SEQ ID NO: 4372 - DNA, 60 bp, Artificial Sequence
  Probe
tggtgtgtttcctgctccttgccaaaactggaagaaccagcatccagcgtgacctcaagg

SEQ ID NO: 4373 - DNA, 60 bp, Artificial Sequence
  Probe
agggcccaaggtctcccatctgccaagctattgtccaagcgtgagttgatgtctcaggaa

SEQ ID NO: 4374 - DNA, 60 bp, Artificial Sequence
  Probe
agtcaggcctgactcagctgctgatgactgaggtcatgaagctgcagaagaaggtgcagg

SEQ ID NO: 4375 - DNA, 60 bp, Artificial Sequence
  Probe
ctcctgctttctcactgagactgtgcagattgtgtgggtggcgagttggttgtgcaaggc

SEQ ID NO: 4376 - DNA, 60 bp, Artificial Sequence
  Probe
tagagggcatcgtgaggctcagagaggttaagtgacttgctgagggtcacacagcaggga

SEQ ID NO: 4377 - DNA, 60 bp, Artificial Sequence
  Probe
taggccagggtggaggcactgttttcaagaacaggagtgttcccacaggtgaccctttct

SEQ ID NO: 4378 - DNA, 60 bp, Artificial Sequence
  Probe
aggcagccacctaaggtggaggtgggggaatagtgtttcccaggaagctcattgagttgt

SEQ ID NO: 4379 - DNA, 60 bp, Artificial Sequence
  Probe
tcagaggacacctgagtccgtgaacacctttgcaaagccttcttggggtgtgagggaagt

SEQ ID NO: 4380 - DNA, 60 bp, Artificial Sequence
  Probe
aatggaccaggatgaggaagagcagacggttctgaccccaatgccagcttatgccagaca

SEQ ID NO: 4381 - DNA, 60 bp, Artificial Sequence
  Probe
tccatgtgccccctctaccatttgcagagtcctgcacagttttctggctggagcctagaa

SEQ ID NO: 4382 - DNA, 60 bp, Artificial Sequence
  Probe
agtgcgctcattacagccttacagtaaccaggtggggggtaaggtcctgtgcccatttca

SEQ ID NO: 4383 - DNA, 60 bp, Artificial Sequence
  Probe
tgtagtgacagcaccactgcctctgtttcccttcctcttgtgatggcagcagcgtctcaa

SEQ ID NO: 4384 - DNA, 60 bp, Artificial Sequence
  Probe
aggtttacccctggagggaaagtcacaagctcatgtccagaaggccagtagcagcaagct

SEQ ID NO: 4385 - DNA, 60 bp, Artificial Sequence
  Probe
gtgccccatcagttcatcggcaagatctgtgaccagctcaagggccatctgaaggcaaac

SEQ ID NO: 4386 - DNA, 60 bp, Artificial Sequence
  Probe
agcttggggacctcaggatcttgccccaagtcacagaactaaggaattggcagagccagt

SEQ ID NO: 4387 - DNA, 60 bp, Artificial Sequence
  Probe
gtgaccatttggaccgcctttttgctcccaaggaagctgggaaacagccacgtacagtga

SEQ ID NO: 4388 - DNA, 60 bp, Artificial Sequence
  Probe
atggctgccatctgttaggacaatcatgacacacatactgaggctgccccgtctcctggg

SEQ ID NO: 4389 - DNA, 60 bp, Artificial Sequence
  Probe
tagcatgaacgcagccacagacaacaattgagtggcgaggctgtccccacaaagctttgt

SEQ ID NO: 4390 - DNA, 60 bp, Artificial Sequence
  Probe
tccatggcaggaaggcgggggatttcaagtttagggattgggtcgtggtggagaatctga

SEQ ID NO: 4391 - DNA, 60 bp, Artificial Sequence
  Probe
atgttgtacccatctccaggccaccagaaccctgatgaccttgaatttggggagtgggga

SEQ ID NO: 4392 - DNA, 60 bp, Artificial Sequence
  Probe
cgaggcttctgccattttcagttcgccaactcatggtgcaaggtggctgttgtagctcca

SEQ ID NO: 4393 - DNA, 60 bp, Artificial Sequence
  Probe
gtggggacagggaaggtggctgttggacaggagttgtcaatgtgtgccttgttgcaaaga

SEQ ID NO: 4394 - DNA, 60 bp, Artificial Sequence
  Probe
tggttggcactagactggtggcaggggcttctagctgacttgcacagggattctcacaat

SEQ ID NO: 4395 - DNA, 60 bp, Artificial Sequence
  Probe
gacccacgaatgatgccttgggtgggcaacacgattgcatgttgtggagacacttcggaa

SEQ ID NO: 4396 - DNA, 60 bp, Artificial Sequence
  Probe
aggaatttgaacacaggtagtgtgggtcaggcatctgcagccctagccactatgccacct

SEQ ID NO: 4397 - DNA, 60 bp, Artificial Sequence
  Probe
gtgatgtcggtggccacaattgtcatagtggacatctgcatcactgggggcttgctgctg

SEQ ID NO: 4398 - DNA, 60 bp, Artificial Sequence
  Probe
acttcccaccccaagggaactcaaagcttgtgtcaaggccaaggaaaaattccccctccg

SEQ ID NO: 4399 - DNA, 60 bp, Artificial Sequence
  Probe
gttcgaccagtacagtcgtggtcgtggtttgcagtttgttgttggtggtggcagtggtgg

SEQ ID NO: 4400 - DNA, 60 bp, Artificial Sequence
  Probe
agacatctcgatcctgcagcggtccttggccattttggagtcgatggtgctcaatagcca

SEQ ID NO: 4401 - DNA, 60 bp, Artificial Sequence
  Probe
tgccgacctgaaaatggagaggagcacacctttgctgtggagattttgcccagggtgttg

SEQ ID NO: 4402 - DNA, 60 bp, Artificial Sequence
  Probe
agcgaccaaaaagcccagggggcattcaaccccatgtttctagaactctgttcctgctgc

SEQ ID NO: 4403 - DNA, 60 bp, Artificial Sequence
  Probe
gggggacacatccaactaaccatgcttggagccatgcaggtttccaaatacggcgacctg

SEQ ID NO: 4404 - DNA, 60 bp, Artificial Sequence
  Probe
gctggcgtctgcatacgagagacttggttgaacttggttggtccttgtctgcaccctcga

SEQ ID NO: 4405 - DNA, 60 bp, Artificial Sequence
  Probe
aagctcccgagtcttttccccacattcaagagggttgctgggtgcatccatacccagcta

SEQ ID NO: 4406 - DNA, 60 bp, Artificial Sequence
  Probe
ttgggaggggagagagaagggcagggaatatcaagtcggattctcctgctctgtccccag

SEQ ID NO: 4407 - DNA, 60 bp, Artificial Sequence
  Probe
tggcagtgcaggatgcagtagatgccctgatgcagaaggctttcaactcctcgtccttca

SEQ ID NO: 4408 - DNA, 60 bp, Artificial Sequence
  Probe
acagctttaacctccagccttgtttcttcatggttgcagggtggctatcacagcgctggc

SEQ ID NO: 4409 - DNA, 60 bp, Artificial Sequence
  Probe
tcagggcacctttcacagccagcaggcattggaatatggcaccaaactcgttggaggaac

SEQ ID NO: 4410 - DNA, 60 bp, Artificial Sequence
  Probe
gcaccagcatctacaggacgtggacattgagccctacgtcagcaagatgctaggcactgg

SEQ ID NO: 4411 - DNA, 60 bp, Artificial Sequence
  Probe
ccactgccccactgcccaactcatagccacgctgaagaatgggaggaaaatttgcttgga

SEQ ID NO: 4412 - DNA, 60 bp, Artificial Sequence
  Probe
ggggcttgtgagagctttcttcactcaagaccctcacagttcacactggggccagcctta

SEQ ID NO: 4413 - DNA, 60 bp, Artificial Sequence
  Probe
gctgggccaaaggggagggggaatgaaaagagtgtttctggcagaggaaatggcaaggat

SEQ ID NO: 4414 - DNA, 60 bp, Artificial Sequence
  Probe
tgtagctggaccagcaggaggattcagggtgagaggtatggaccagagcgttgtgtgtga

SEQ ID NO: 4415 - DNA, 60 bp, Artificial Sequence
  Probe
tacccagtgatgtcagagcatgagtccagatgtgctctgtgcgtgcatgggatggcttcc

SEQ ID NO: 4416 - DNA, 60 bp, Artificial Sequence
  Probe
tccttgtgtttgctggctgcttgatgaaggacaaaggccatgatggggtcaaggagctgg

SEQ ID NO: 4417 - DNA, 60 bp, Artificial Sequence
  Probe
acatgtccccacagttccaatgtgcctgttcactcacctctcccttccccaacccttctc

SEQ ID NO: 4418 - DNA, 60 bp, Artificial Sequence
  Probe
ggagaccggctttcccgcaatcatgtaccctggatcttttattgggggctggggagaaga

SEQ ID NO: 4419 - DNA, 60 bp, Artificial Sequence
  Probe
aggcgagtcggaggaggtagaggtgactgacatcagtgatgaggatgaggaagacgggga

SEQ ID NO: 4420 - DNA, 60 bp, Artificial Sequence
  Probe
tcacgaaacagtggccacacaaatgtgaggtggggttggaaggagaccctgtccagtctt

SEQ ID NO: 4421 - DNA, 60 bp, Artificial Sequence
  Probe
ctcctcctggagctgggtgttgactctgtccaagactctgctcagtcacttcctggctga

SEQ ID NO: 4422 - DNA, 60 bp, Artificial Sequence
  Probe
gccggcgttggacagcaatctcttccccatgattcctgactacaacctctaccaccaccc

SEQ ID NO: 4423 - DNA, 60 bp, Artificial Sequence
  Probe
gggcgaggagctctcctgcgaagagcgaaacctgctctcagtagcctataagaacgtggt

SEQ ID NO: 4424 - DNA, 60 bp, Artificial Sequence
  Probe
ccactggccagcatctgtcaaaactgagggacagactcctgtgcaagtcgagggaaagct

SEQ ID NO: 4425 - DNA, 60 bp, Artificial Sequence
  Probe
tcacccgtcgtccatgttcgaggactctgtgaatctgtggtggaagcagacctcgtggaa

SEQ ID NO: 4426 - DNA, 60 bp, Artificial Sequence
  Probe
ttctggacgatggcatcgagaagaaccacccggacttggcaggcaattatgatcctgggg

SEQ ID NO: 4427 - DNA, 60 bp, Artificial Sequence
  Probe
gacacggtgaccaagatctgcgtgttcctcttcgccttcgtggtgcccatcctcatcatc

SEQ ID NO: 4428 - DNA, 60 bp, Artificial Sequence
  Probe
tcaagctggctgactttggcctggccagaatctacagctaccagatggcacttacacccg

SEQ ID NO: 4429 - DNA, 60 bp, Artificial Sequence
  Probe
ttaaacctctcaaccaagtggctttcctggtgctgtccctgaagcaggtgtgaggcctga

SEQ ID NO: 4430 - DNA, 60 bp, Artificial Sequence
  Probe
aactccagagaggggtgggggaacctcaaggagttgatgaaacatgccagtgacagccac

SEQ ID NO: 4431 - DNA, 60 bp, Artificial Sequence
  Probe
tctggtacaccaagcaaaccccagaggttcagcaggcccttgctgtactcccacaaagat

SEQ ID NO: 4432 - DNA, 60 bp, Artificial Sequence
  Probe
cctttgctccactgccacatatgtgaggacagcccagccaaccttccttacctcctaccc

SEQ ID NO: 4433 - DNA, 60 bp, Artificial Sequence
  Probe
cagtcagagaactgcgttccccaccccttcccctttggaaacgtcacactgtggaggaaa

SEQ ID NO: 4434 - DNA, 60 bp, Artificial Sequence
  Probe
gaacggagcagggaggggcagtgatctgcaaggctgattaatcccatacaagacagcgct

SEQ ID NO: 4435 - DNA, 60 bp, Artificial Sequence
  Probe
gcctcagcaatgtgaagctgaacgagcacttcctgaacaccacggacttcctcgacacca

SEQ ID NO: 4436 - DNA, 60 bp, Artificial Sequence
  Probe
tagagggctggtgacttgtgcttgtctgaatgcaggaaaccaggcctgtgtagccttcgg

SEQ ID NO: 4437 - DNA, 60 bp, Artificial Sequence
  Probe
agtgctaaagccgggcagcaagctcactgcatttgcacttctccatgggaaatgcctctt

SEQ ID NO: 4438 - DNA, 60 bp, Artificial Sequence
  Probe
tctgctgttgacaatggctctctggccaacacgcctcatctgagggagcttcacttggac

SEQ ID NO: 4439 - DNA, 60 bp, Artificial Sequence
  Probe
ctgggaaacagcctggtcatcctggtccttgtggtctgcaagaagctgaggagcatcaca

SEQ ID NO: 4440 - DNA, 60 bp, Artificial Sequence
  Probe
ctccatctgcgttgatgctcagaatcgcctacctgtgcctgcgtgtaaaccacagcctca

SEQ ID NO: 4441 - DNA, 60 bp, Artificial Sequence
  Probe
gtggtttgtctgacaatgtggggaaacccagtctgctggccagcccttgcatgaagtagc

SEQ ID NO: 4442 - DNA, 60 bp, Artificial Sequence
  Probe
ccgccctctgagcacgtgttactgccagtctgcgtcagcgttgggtaaatacatgactgg

SEQ ID NO: 4443 - DNA, 60 bp, Artificial Sequence
  Probe
tttcccaaggcggagccttcaaactgggacacatagtctctgccgctgtctttgagcaca

SEQ ID NO: 4444 - DNA, 60 bp, Artificial Sequence
  Probe
agaaagggaacgtgggcgagtgctttggttcagagaggggagccattttgcctaaggtca

SEQ ID NO: 4445 - DNA, 60 bp, Artificial Sequence
  Probe
caagtcgtggcttgtccacttcctagctgtgtgcaaccacttcccagctctgagcctcag

SEQ ID NO: 4446 - DNA, 60 bp, Artificial Sequence
  Probe
gtgactcccaaatcctttgggtcacctggatccctggggaagctgctttgtgaggtgact

SEQ ID NO: 4447 - DNA, 60 bp, Artificial Sequence
  Probe
ggcgggacttggacttggctggcctctgagagtgagtgcctccttaaattttgtgcccta

SEQ ID NO: 4448 - DNA, 60 bp, Artificial Sequence
  Probe
gcctcctgattggtctctgcctcagttcttcccttgctccaagccaagggcagtcaagat

SEQ ID NO: 4449 - DNA, 60 bp, Artificial Sequence
  Probe
atcaggcctgactcgctgctctttttgttcccttctgtctgctcgaaccacttgcctcgg

SEQ ID NO: 4450 - DNA, 60 bp, Artificial Sequence
  Probe
gtatgcagctgtcagcgttgggctgcaaaccagtgacatcaccgagtacctcaggaagct

SEQ ID NO: 4451 - DNA, 60 bp, Artificial Sequence
  Probe
caggagctcggagtggtggtaacagatgccctaagagcagatgccctaaggagcactgga

SEQ ID NO: 4452 - DNA, 60 bp, Artificial Sequence
  Probe
aggtttgggagtctggtgggaacaatgccaccaccactgacagtagcgacacccttcatg

SEQ ID NO: 4453 - DNA, 60 bp, Artificial Sequence
  Probe
tgtcgggagtagcactgccgctgctgttacagccaccaggagttttatttcgggagcaag

SEQ ID NO: 4454 - DNA, 60 bp, Artificial Sequence
  Probe
ggtcactcaatctcaacagcccagaagcatctgcaacctccccaatggccttgccctttg

SEQ ID NO: 4455 - DNA, 60 bp, Artificial Sequence
  Probe
tgatgaaggtgttgctgaccttggaggggtttgttggtggttgaagtgctgctggccatg

SEQ ID NO: 4456 - DNA, 60 bp, Artificial Sequence
  Probe
ggcgagagggtgtacgtcaacatcagtcaccccgatatggtggacttcgcgagagggaag

SEQ ID NO: 4457 - DNA, 60 bp, Artificial Sequence
  Probe
tgagacgtccctcctgcccctggctgccttatttcatctgcacccaatcgtatccattgc

SEQ ID NO: 4458 - DNA, 60 bp, Artificial Sequence
  Probe
aaccctgcagggccatgccttgaattccctcacggaaagcatgatggaaaacctccaacg

SEQ ID NO: 4459 - DNA, 60 bp, Artificial Sequence
  Probe
cctgtggggggcagagggttttcacagaggacgcagtttgagctgaatcttgactgcaga

SEQ ID NO: 4460 - DNA, 60 bp, Artificial Sequence
  Probe
cccgacttcgagctgctcagtgaccctgaggatgaacacttgtgtgccaacctgatgcag

SEQ ID NO: 4461 - DNA, 60 bp, Artificial Sequence
  Probe
aatccctgctttgccggcgtgaagtgtactagctaccctgatggcagctggaaatgtggt

SEQ ID NO: 4462 - DNA, 60 bp, Artificial Sequence
  Probe
aggtctttgcacggtttggcagtgccatagctcctttgggagatctggaccaggatggtt

SEQ ID NO: 4463 - DNA, 60 bp, Artificial Sequence
  Probe
agttggtctcttcccatggcgatgtccatctgccaccgtggcactggtattgctttgagt

SEQ ID NO: 4464 - DNA, 60 bp, Artificial Sequence
  Probe
aactgcaaccacagttatccccacccaagccgttgtggtcttttgcctttgtccaagcca

SEQ ID NO: 4465 - DNA, 60 bp, Artificial Sequence
  Probe
acacagccctcctaagaggcttcctggaggtttcgagattcagatgccctgggagatccc

SEQ ID NO: 4466 - DNA, 60 bp, Artificial Sequence
  Probe
gagcaagcggtcatcatcccatcccatcttccacaggggcgaattctcggtgtgtgacag

SEQ ID NO: 4467 - DNA, 60 bp, Artificial Sequence
  Probe
gctttggcaagcaggggtgctactgagtgtgtgagtatttccctctggacgtgtgtcccc

SEQ ID NO: 4468 - DNA, 60 bp, Artificial Sequence
  Probe
ggcagctttaggtatgctgtggttggaaggctgttggcatgggaaagctggaagtgtggg

SEQ ID NO: 4469 - DNA, 60 bp, Artificial Sequence
  Probe
ctggtgataagaatggggtagcagagctgggtgcagtgctgggcagtgttgaatgggact

SEQ ID NO: 4470 - DNA, 60 bp, Artificial Sequence
  Probe
atacaggaggcagagacacagctggactagaacccaggctttaggttcccaggcaagggt

SEQ ID NO: 4471 - DNA, 60 bp, Artificial Sequence
  Probe
aactggagcccttgcaaaaacacggcttgtggcattggcatacttgcccttacaggtgga

SEQ ID NO: 4472 - DNA, 60 bp, Artificial Sequence
  Probe
agaaatgcagaacacggccacctcttagcccaacgatggcagttttggggaaaactggcc

SEQ ID NO: 4473 - DNA, 60 bp, Artificial Sequence
  Probe
ctcatcatggagcccatgtggtgtgggcagtgaccagagttcagggtcatcatgcacaca

SEQ ID NO: 4474 - DNA, 60 bp, Artificial Sequence
  Probe
ctggtttgcaggcctcttcaataaaggtggggctgtgctaggcattggggatgcagcaat

SEQ ID NO: 4475 - DNA, 60 bp, Artificial Sequence
  Probe
ggaagaatcccctggtctccgtgagcgtccattttgtggaacctgagttgcaagcaggga

SEQ ID NO: 4476 - DNA, 60 bp, Artificial Sequence
  Probe
cagggctgtgctagctgcctgtagccactacttcaagaagcttttcactgagggcggtgg

SEQ ID NO: 4477 - DNA, 60 bp, Artificial Sequence
  Probe
ttccctccaattcccacttgccctccacctgctactctgttatctactggctctgcccgt

SEQ ID NO: 4478 - DNA, 60 bp, Artificial Sequence
  Probe
tccctgtgcacaagtggtgcatcaggtaggtggggtgtgtgtgtgtgtgatgtggaacat

SEQ ID NO: 4479 - DNA, 60 bp, Artificial Sequence
  Probe
caccggcttcatgtgcagcaacaccagcagaaccaaaatcgtgtgtggtggcagatcctc

SEQ ID NO: 4480 - DNA, 60 bp, Artificial Sequence
  Probe
gaagaagcggctggaagcctttctcacccagaaagccaaggtcggcgaactcaaagacga

SEQ ID NO: 4481 - DNA, 60 bp, Artificial Sequence
  Probe
tgcaagatgtgcctgcaggtgatgacacctatgtttgcacagcccaaaacttgctgggct

SEQ ID NO: 4482 - DNA, 60 bp, Artificial Sequence
  Probe
tcctcacgcctcccctatgtgtcttaggggactctggcttctctttttgcaagggcctct

SEQ ID NO: 4483 - DNA, 60 bp, Artificial Sequence
  Probe
gtgcctggacaatgctctgatccacccaggtgttggcagcattgttgcaaaggtcacctc

SEQ ID NO: 4484 - DNA, 60 bp, Artificial Sequence
  Probe
gcagtgtcccccatcccgaccccacaggaagacaaattagaaaaagccccctctggatcc

SEQ ID NO: 4485 - DNA, 60 bp, Artificial Sequence
  Probe
gccaaggttcgccaggcactgggatttgccaagtgtcaaaagaacttctatggagcggcc

SEQ ID NO: 4486 - DNA, 60 bp, Artificial Sequence
  Probe
aatgagggcatggggtggtccctcaagaccttcccctaccttttgtggaaccagtgatgc

SEQ ID NO: 4487 - DNA, 60 bp, Artificial Sequence
  Probe
ttccacgggaaagtgttgtaggggaaactccaggcagagtgtcgggggattaacgggaga

SEQ ID NO: 4488 - DNA, 60 bp, Artificial Sequence
  Probe
tcctcacaaggactcatggcttgccccatagcatcacatctgtgctgcttaccagctgcg

SEQ ID NO: 4489 - DNA, 60 bp, Artificial Sequence
  Probe
tggcattcccctaccctgaagttatgctttccttctgtgctctgtgctggccagaggtgc

SEQ ID NO: 4490 - DNA, 60 bp, Artificial Sequence
  Probe
agctgggatgcaaaccctaaactgccagccctcaaagcctgtgctcttaatctccaccct

SEQ ID NO: 4491 - DNA, 60 bp, Artificial Sequence
  Probe
atgggtggactggtggggattctggcgtaaaatggtatggtggcatgagtcagggcacaa

SEQ ID NO: 4492 - DNA, 60 bp, Artificial Sequence
  Probe
gagtccctggggaaagggaacagagtaaggcaggccttgttctcactgccctctaaggga

SEQ ID NO: 4493 - DNA, 60 bp, Artificial Sequence
  Probe
gaccagggaactaggtggtacatgcttgcacccagcattcaaagtgagaggcctgtgcca

SEQ ID NO: 4494 - DNA, 60 bp, Artificial Sequence
  Probe
ctccacccacagacacaaggttaggacacctccatttccactgcctcccctcacccagta

SEQ ID NO: 4495 - DNA, 60 bp, Artificial Sequence
  Probe
ggtcctagactcaactccgtgccacccttcagcctacgttgtgggttcctgctaagctga

SEQ ID NO: 4496 - DNA, 60 bp, Artificial Sequence
  Probe
cacttgccattgcctcagctttcccctaaacacggtgtctgtggtcagggttggtgagga

SEQ ID NO: 4497 - DNA, 60 bp, Artificial Sequence
  Probe
agctgccaagtaggtggccgaaagactttttgtccagagccgcctccaatggccaagata

SEQ ID NO: 4498 - DNA, 60 bp, Artificial Sequence
  Probe
acacctgttcctcaggcctcctccctcaataccgtctctttgacttgctctcctggcacc

SEQ ID NO: 4499 - DNA, 60 bp, Artificial Sequence
  Probe
ccagacgaggtggacgtcttcttcaatcacctcgactcgcagggcaacccctactatgcc

SEQ ID NO: 4500 - DNA, 60 bp, Artificial Sequence
  Probe
agcctccttggataagctaagcacattccaccctcaaggcctttgcacttgctgctccct

SEQ ID NO: 4501 - DNA, 60 bp, Artificial Sequence
  Probe
agcagcaggaacttgggcctcttctaggaatggtgtagacccaagaaaggaggggctcgt

SEQ ID NO: 4502 - DNA, 60 bp, Artificial Sequence
  Probe
tgcagcagttctagccaagtgcatgcatacaggccttgaggtggagctgcacagttgact

SEQ ID NO: 4503 - DNA, 60 bp, Artificial Sequence
  Probe
ggagccatctcagtgtgtggaggagctggaggatgatgtgttccaaccagaggatgggga

SEQ ID NO: 4504 - DNA, 60 bp, Artificial Sequence
  Probe
tgcacctgagcaagcctgcctcttagccaaacaagccttcgatgatgccatagctgagct

SEQ ID NO: 4505 - DNA, 60 bp, Artificial Sequence
  Probe
agaggcatcatccggttcatcattggcttcagcgcacccatgtccatcgttgctgtcagt

SEQ ID NO: 4506 - DNA, 60 bp, Artificial Sequence
  Probe
gtgcccgcacagacttctactgcctggtgtccaaggatgatatgtagctcccaccccaga

SEQ ID NO: 4507 - DNA, 60 bp, Artificial Sequence
  Probe
ggattgccttcctgccttcccaggatgtggagctggtatactccttcccactctggtgga

SEQ ID NO: 4508 - DNA, 60 bp, Artificial Sequence
  Probe
tcacacctcacttctgctttgtcctaggcaaactccaagcacactggcaaggacagggcc

SEQ ID NO: 4509 - DNA, 60 bp, Artificial Sequence
  Probe
agttggagggagtgttgtcacaagccaaggaatgccagcagctaccagaaaccggaaggg

SEQ ID NO: 4510 - DNA, 60 bp, Artificial Sequence
  Probe
ttcagatgctgacaattttggtgacccctgagatttgctgggagacggggaagggccagg

SEQ ID NO: 4511 - DNA, 60 bp, Artificial Sequence
  Probe
tcaccgctgggtccaaagtgatccaaaacgaattcacggtgggggaggaatgtgagctgg

SEQ ID NO: 4512 - DNA, 60 bp, Artificial Sequence
  Probe
agcagccgccagcgccaataaataagcccattaaccggcgaagttcgagtgtacgatccc

SEQ ID NO: 4513 - DNA, 60 bp, Artificial Sequence
  Probe
gcaagggaagaaaaagggcagcaatgaccctcaatgggccatttgagggatctggcctgg

SEQ ID NO: 4514 - DNA, 60 bp, Artificial Sequence
  Probe
ctgccacaggaggttccccaagtgaaaacagtcagccacctgccctataggaaacagccc

SEQ ID NO: 4515 - DNA, 60 bp, Artificial Sequence
  Probe
cagctggggtgaagaatggggcatgggtggctacgtaaagatggccaaagaccggagaaa

SEQ ID NO: 4516 - DNA, 60 bp, Artificial Sequence
  Probe
ggccttgggtacctgcagagccttttctctgaattccttatgtccggtgggccagaagcc

SEQ ID NO: 4517 - DNA, 60 bp, Artificial Sequence
  Probe
tcagtcctgccgaggcagatggcttcctccagctctgcttactgaatgcgaagtcacagt

SEQ ID NO: 4518 - DNA, 60 bp, Artificial Sequence
  Probe
ccccattgcacgcaggacatagcagaggctcagaggttgcgtggtttgcttgatgactca

SEQ ID NO: 4519 - DNA, 60 bp, Artificial Sequence
  Probe
agagccctgggtgcttgtggtgcaaagatcttcatgcccagttccaaagtgaggtccctc

SEQ ID NO: 4520 - DNA, 60 bp, Artificial Sequence
  Probe
tgctgaagactgctgcctgtctgtgacccagaaacccatccctgggtacatcgtgaggaa

SEQ ID NO: 4521 - DNA, 60 bp, Artificial Sequence
  Probe
actgaggcaggagatgggcagggcttgtgttctggtcacaatcctgctgaccaaaacagg

SEQ ID NO: 4522 - DNA, 60 bp, Artificial Sequence
  Probe
aggcccaggctgagtcactccaggaaagagctgatgaggctacaacccagaagcagtctg

SEQ ID NO: 4523 - DNA, 60 bp, Artificial Sequence
  Probe
tcaaaccggatcctgggggtgaagagaaagatccccctgatgctgaacgacagtggctca

SEQ ID NO: 4524 - DNA, 60 bp, Artificial Sequence
  Probe
tcttcccaggtcttggccctctgtgttaaccctgatcttctgagcagccccaacttccct

SEQ ID NO: 4525 - DNA, 60 bp, Artificial Sequence
  Probe
agcctggtcaccagcttttcggaacagcagagacacagagggcagtcatgagtgaggtca

SEQ ID NO: 4526 - DNA, 60 bp, Artificial Sequence
  Probe
agtgtgtaccgtgtgcacatgtatgtgtgtgcctgtggaccagcacctgtgttgccacat

SEQ ID NO: 4527 - DNA, 60 bp, Artificial Sequence
  Probe
cctggaccaggtgctgaaagaggccaagaggattcccgaggagatcctggggaaagtcag

SEQ ID NO: 4528 - DNA, 60 bp, Artificial Sequence
  Probe
gtgtgctggggaagctccatgcacagtgccctatggagataacaagctgagccatgctcc

SEQ ID NO: 4529 - DNA, 60 bp, Artificial Sequence
  Probe
aggcttcatgggggttggagggtctgctttgaagatggctcactagcagtgctgcctttg

SEQ ID NO: 4530 - DNA, 60 bp, Artificial Sequence
  Probe
cctgccaccgtcgcacaaatctcgaaacaacatccttcgcaccagcctggacctctatgc

SEQ ID NO: 4531 - DNA, 60 bp, Artificial Sequence
  Probe
gagcgtccatgaccactgtgcacacacagcaggtttcatgagaagctggagcactggctc

SEQ ID NO: 4532 - DNA, 60 bp, Artificial Sequence
  Probe
tgatcaccatcttactgagcacattgccactgcagccagcaactgagaagccagcgcaca

SEQ ID NO: 4533 - DNA, 60 bp, Artificial Sequence
  Probe
ggagtcacgtgcagccccttttggctgaggctgaaatctccttcacgctgatgctcactg

SEQ ID NO: 4534 - DNA, 60 bp, Artificial Sequence
  Probe
cagtgcgtctgcatgaattcctggcagctctccaaaatgggctcagggcttgtgaggact

SEQ ID NO: 4535 - DNA, 60 bp, Artificial Sequence
  Probe
aaccaagccttggcaccgccagatcctttctgtaggctaattcctcttgcccaacggcat

SEQ ID NO: 4536 - DNA, 60 bp, Artificial Sequence
  Probe
agagcagccagttgcagggctccattctgctttccaactgcctgactgcttgttcgtctc

SEQ ID NO: 4537 - DNA, 60 bp, Artificial Sequence
  Probe
tgagccacttgcttgggccgctgccattctgtggagtgtgctttcactactattgcctcc

SEQ ID NO: 4538 - DNA, 60 bp, Artificial Sequence
  Probe
ctgagggacagcgagagcgtgccaggcgtgtactgcctatgtgtgctgtatcacggttac

SEQ ID NO: 4539 - DNA, 60 bp, Artificial Sequence
  Probe
attgcatctgtttcctgcccccacctcttccttacatgccgtgtgtgtgattgggccact

SEQ ID NO: 4540 - DNA, 60 bp, Artificial Sequence
  Probe
acatgttgggggagtcgtgttgtaatgggggcaacgctaggctgctgttggtgaatgacg

SEQ ID NO: 4541 - DNA, 60 bp, Artificial Sequence
  Probe
gggcagctgatgaacacctggattgactctctgcaggcctttttccctggactgcaggtg

SEQ ID NO: 4542 - DNA, 60 bp, Artificial Sequence
  Probe
accctcacttccatcaccccattccccctcttcagtgggtgaagtcactggtcagcacaa

SEQ ID NO: 4543 - DNA, 60 bp, Artificial Sequence
  Probe
accctgcgcactggaagatctggccagcaaccttgttattttcaccagccctctcccatg

SEQ ID NO: 4544 - DNA, 60 bp, Artificial Sequence
  Probe
aatggtggggctttggggagcagatggaggaactgggggtaaaacagcgtgttccagttt

SEQ ID NO: 4545 - DNA, 60 bp, Artificial Sequence
  Probe
gggcactaatccagcccttaaatcccccagcttccaaacttgaggcccaccatctccacc

SEQ ID NO: 4546 - DNA, 60 bp, Artificial Sequence
  Probe
ggccctttcctgtgtacacgtgacagagtgccttttcgagactggcagggacgaggacaa

SEQ ID NO: 4547 - DNA, 60 bp, Artificial Sequence
  Probe
ctggccctcatgctaggcaccagcctcatctattggaccctctttacactgggcctggat

SEQ ID NO: 4548 - DNA, 60 bp, Artificial Sequence
  Probe
tcgctgctcaatgaggggtatctgcagcctgctggagacatgtccaagagtgcagtggat

SEQ ID NO: 4549 - DNA, 60 bp, Artificial Sequence
  Probe
acgcaaaagctaccccatgctcaagttggtgcgcctgaagctgtggttccctcgattcat

SEQ ID NO: 4550 - DNA, 60 bp, Artificial Sequence
  Probe
tcccagcctctgttgaaaggaactcatgagccagccccttcactctcagccagctctgtt

SEQ ID NO: 4551 - DNA, 60 bp, Artificial Sequence
  Probe
acccagtgctggagccccagcttctaacagggcactatttccctcctgtaggcatcactg

SEQ ID NO: 4552 - DNA, 60 bp, Artificial Sequence
  Probe
agttggtgctcctggagctgctttctccttgatttgcccatgcttacctccagcagtggc

SEQ ID NO: 4553 - DNA, 60 bp, Artificial Sequence
  Probe
acaacctcgaccacctggtcgaggagctcttccttggtgacattcacactgatgccaccc

SEQ ID NO: 4554 - DNA, 60 bp, Artificial Sequence
  Probe
cccttggcccgagccagctaccattgcacctctagctgcaaacaaagctaagacagcagg

SEQ ID NO: 4555 - DNA, 60 bp, Artificial Sequence
  Probe
ggaggcagcggcttttatgctcaaaaggaatgagtcccagtggctggcacagagaaggca

SEQ ID NO: 4556 - DNA, 60 bp, Artificial Sequence
  Probe
gcgaagatggcaaggatggatcacctggagaacctggtgcaaatgggcttccaggagctg

SEQ ID NO: 4557 - DNA, 60 bp, Artificial Sequence
  Probe
tgcagggccaacatcctctggaagggacatgggagaatattaggagcagtggagctgggg

SEQ ID NO: 4558 - DNA, 60 bp, Artificial Sequence
  Probe
acggtcgcttcctggaaattggcaaattcgacctttctcagaaccacccgctcggcatgg

SEQ ID NO: 4559 - DNA, 60 bp, Artificial Sequence
  Probe
accacaatgcccagcatgtggggaagagagaggaaaggtggggtttatcctcacccgagt

SEQ ID NO: 4560 - DNA, 60 bp, Artificial Sequence
  Probe
acgtgctttctggtggcagccacccctttggagacagtctttatcgccaggcaaacatcc

SEQ ID NO: 4561 - DNA, 60 bp, Artificial Sequence
  Probe
tggctccaggccatgtctaatgaccagctcgattccctgtgcagttcagagggcaagtga

SEQ ID NO: 4562 - DNA, 60 bp, Artificial Sequence
  Probe
agcagctgtggtcaggctgctgacctttctctcaggccttgttctctgcctcacactcaa

SEQ ID NO: 4563 - DNA, 60 bp, Artificial Sequence
  Probe
accatccctatctagcaagccatgcctgcttcctggtttgtgcatgttgccctgtgtgct

SEQ ID NO: 4564 - DNA, 60 bp, Artificial Sequence
  Probe
tggaggctgccctttgacctttggacgccacctgtaatcactctggatggtgtctgtgga

SEQ ID NO: 4565 - DNA, 60 bp, Artificial Sequence
  Probe
aaccagtgtgtccaagctgctcggcttggagcaatgacgtccatggtgtgtaaggttggc

SEQ ID NO: 4566 - DNA, 60 bp, Artificial Sequence
  Probe
tgtcatgggtgcccgcaactttgtgttggtgctatcacctggagcactggacaagtgcat

SEQ ID NO: 4567 - DNA, 60 bp, Artificial Sequence
  Probe
gaggccatggctgatctgcacaccctcagcgaggactcctacaaagacagcaccctcatc

SEQ ID NO: 4568 - DNA, 60 bp, Artificial Sequence
  Probe
tgcttgcccatgtttggctacaaacacgtgctgacgctaactgaccaggtgacccgcttc

SEQ ID NO: 4569 - DNA, 60 bp, Artificial Sequence
  Probe
cccatccaatggatggagaagcacctcccatccatctggccaaggtaaccgcagagacga

SEQ ID NO: 4570 - DNA, 60 bp, Artificial Sequence
  Probe
agagggtcttcagccctgcgtgtgcagatgacaagacagaggctggtgtttccagacagg

SEQ ID NO: 4571 - DNA, 60 bp, Artificial Sequence
  Probe
accaggcctggtgcacgtgctttatgtgtcatttcatcactgccagccacctcaagaggc

SEQ ID NO: 4572 - DNA, 60 bp, Artificial Sequence
  Probe
gtcggcttctctccctccttcccctgtacttagcaacagatggcagcagcatctgcccaa

SEQ ID NO: 4573 - DNA, 60 bp, Artificial Sequence
  Probe
attaggagggctcaggccatcaactggagcttgtgaaaggggttgccgaagagaggtggt

SEQ ID NO: 4574 - DNA, 60 bp, Artificial Sequence
  Probe
agcctcagacctgcaacatggttttaaggctttccctgccctctccagctccctcttcct

SEQ ID NO: 4575 - DNA, 60 bp, Artificial Sequence
  Probe
cgtgcgccttatagcctctcaacttcttgcttgggatctccaacctcaccgcggctcgaa

SEQ ID NO: 4576 - DNA, 60 bp, Artificial Sequence
  Probe
tgcacttcccacatggccctaagtgaggttgctggagcagaagctcccagaatcagacca

SEQ ID NO: 4577 - DNA, 60 bp, Artificial Sequence
  Probe
tgcagcttgccgggattgctgtccttgccattggactatggctccgattcgactctcaga

SEQ ID NO: 4578 - DNA, 60 bp, Artificial Sequence
  Probe
tgcgtgtctggtgttgggtgccctctgacccaatatggttgttattcccgctcagggtct

SEQ ID NO: 4579 - DNA, 60 bp, Artificial Sequence
  Probe
gctgtagcgaggaggacctgaaagccatccaggacatgttccccaacatggaccaggagg

SEQ ID NO: 4580 - DNA, 60 bp, Artificial Sequence
  Probe
tgcttcccttgccacccgtaggaacacttgttctgatcccttctaggagcacaggctgcc

SEQ ID NO: 4581 - DNA, 60 bp, Artificial Sequence
  Probe
gccaagggcacagggagaacccagatggagtaacttcatggaagctgaggacttgggcga

SEQ ID NO: 4582 - DNA, 60 bp, Artificial Sequence
  Probe
ccagcctgttgccatgtccctctcagcagacaagttccaggtcctcctggcagaactgaa

SEQ ID NO: 4583 - DNA, 60 bp, Artificial Sequence
  Probe
ccgtagtgttcgtcgtgggcttggtgggcaactcgctggtcatgttcgtgatcatccgat

SEQ ID NO: 4584 - DNA, 60 bp, Artificial Sequence
  Probe
gcccagcctgactcctggagattgtgaatagctccatccagcctgagaaacaagccgggt

SEQ ID NO: 4585 - DNA, 60 bp, Artificial Sequence
  Probe
acttctcccatgtcaatgagcacagccacattcccgagttgaggtgaccccacggtccag

SEQ ID NO: 4586 - DNA, 60 bp, Artificial Sequence
  Probe
aagccctggttctgcgtttgccttgtgctgaagttcagaatgcctctgacgctcacgcac

SEQ ID NO: 4587 - DNA, 60 bp, Artificial Sequence
  Probe
aggtctggccccttcactagctgccctcacttctgcaagaagggaagagtcagagcgaga

SEQ ID NO: 4588 - DNA, 60 bp, Artificial Sequence
  Probe
tctgggaagtccacctctgcagcagcatgtgtggtggctaaaagcatggcttttggaggc

SEQ ID NO: 4589 - DNA, 60 bp, Artificial Sequence
  Probe
cagtccaccatcactgattaccggcgcggttgcggtggatgcacttgaaccaaaccagtg

SEQ ID NO: 4590 - DNA, 60 bp, Artificial Sequence
  Probe
gtcatgctgccttgtggggtgactgaggaaccccagcgactcttttatggcaatgctggc

SEQ ID NO: 4591 - DNA, 60 bp, Artificial Sequence
  Probe
tcatcttcccccacccccatttgctggttcagctatgattcaggtaggctctgccctggg

SEQ ID NO: 4592 - DNA, 60 bp, Artificial Sequence
  Probe
gaccaggtagggtgaggtttgatttgacagcagctggcagaggtagtgcagagggctcgc

SEQ ID NO: 4593 - DNA, 60 bp, Artificial Sequence
  Probe
ttcaggcagtcctgggagaaatggatggctgggatgttcaaggaacagcaggaggccgat

SEQ ID NO: 4594 - DNA, 60 bp, Artificial Sequence
  Probe
ggcctggcctacccagaaacagcaggagagagaagaaacaggccagctgtgagaagccaa

SEQ ID NO: 4595 - DNA, 60 bp, Artificial Sequence
  Probe
accccccgccaatttggttcatcacaaagagtcctgcatgggcattttcccactggggat

SEQ ID NO: 4596 - DNA, 60 bp, Artificial Sequence
  Probe
cgcatgagccgcagctcaggccgagtgtactacttcaaccacatcactaacgccagccag

SEQ ID NO: 4597 - DNA, 60 bp, Artificial Sequence
  Probe
gctgggacaagggagcatccagtgtggcttctcaagtcacaacgacttagggcccctcac

SEQ ID NO: 4598 - DNA, 60 bp, Artificial Sequence
  Probe
ggcttcggggactggattgacagtatcctggccttctcaaggtccctgcacagcttgctt

SEQ ID NO: 4599 - DNA, 60 bp, Artificial Sequence
  Probe
aagaaggaagagcaagaacatggccacacccaccgccccacacgagaaatttgtgcgctg

SEQ ID NO: 4600 - DNA, 60 bp, Artificial Sequence
  Probe
tacccagcctcctttgtgttcaagatccccagcacagcctatgtggtgctcaccagcgtg

SEQ ID NO: 4601 - DNA, 60 bp, Artificial Sequence
  Probe
tgggtgcaaaaccaccacctctgctgtcatggttcactgcctgcgacagaagacggaaga

SEQ ID NO: 4602 - DNA, 60 bp, Artificial Sequence
  Probe
ggcagcaacatggcaagacggtggtgggccaaatcactgtggacatgatgtatggtggca

SEQ ID NO: 4603 - DNA, 60 bp, Artificial Sequence
  Probe
tctgttgcccagcctttcagttaacgcgccctcctcctttgctccctacagccatgaaca

SEQ ID NO: 4604 - DNA, 60 bp, Artificial Sequence
  Probe
ggagcacagttcctcactgtgggccccacctttgaccatcacttctgaaccccagcttca

SEQ ID NO: 4605 - DNA, 60 bp, Artificial Sequence
  Probe
ttgtcgtggcttcctatggactctaactgatgtccggcccctgttgtggctctgacccct

SEQ ID NO: 4606 - DNA, 60 bp, Artificial Sequence
  Probe
cccggggctcaacacacaggctgtggctctggacatccggatattaaaaggagcgttgct

SEQ ID NO: 4607 - DNA, 60 bp, Artificial Sequence
  Probe
gggcccagctgcctatgtaaggccttctagtttgttttgagacccccaccccacgaacca

SEQ ID NO: 4608 - DNA, 60 bp, Artificial Sequence
  Probe
gggggttgccagaaggtgttgggatgtggacaggttgagtcacactgcagggaggtcttc

SEQ ID NO: 4609 - DNA, 60 bp, Artificial Sequence
  Probe
aggaggtgagcgggagctgcaatctgcctgctgcgatattctacctccccaagagacaca

SEQ ID NO: 4610 - DNA, 60 bp, Artificial Sequence
  Probe
tgccctttccctaaccccattccccaacaagccctgtggttttgactgtgcggttttgca

SEQ ID NO: 4611 - DNA, 60 bp, Artificial Sequence
  Probe
ggtcccagtcacctctgcggggcatgccagaaaccactcagccagataaacagtgtggac

SEQ ID NO: 4612 - DNA, 60 bp, Artificial Sequence
  Probe
ccagctgtccagcaggagcacatgcctcaaggcaggagtgatcttcaccaccaagaaggg

SEQ ID NO: 4613 - DNA, 60 bp, Artificial Sequence
  Probe
cactcctccccaaatttcacctctctggtcttcacgatgcccacaatggcccccaccaca

SEQ ID NO: 4614 - DNA, 60 bp, Artificial Sequence
  Probe
gcccagtgtgggtcctccaagtaaggacaaggacaaagtgctgcccagcttctggatccc

SEQ ID NO: 4615 - DNA, 60 bp, Artificial Sequence
  Probe
agtgaaggcccagcttcaaatgtggctggatccaggcacacatcctgaggttctgctggt

SEQ ID NO: 4616 - DNA, 60 bp, Artificial Sequence
  Probe
cccaggaaacagacgcgtgaaaactgagccccagaagaggcacacttgacggcacaggaa

SEQ ID NO: 4617 - DNA, 60 bp, Artificial Sequence
  Probe
gctcgggcagctagatatcgtggacctcaccgacaagctggtcgcctcctactacgagga

SEQ ID NO: 4618 - DNA, 60 bp, Artificial Sequence
  Probe
aggggtgatgctgctggtccacaatgcacactttgcctagcaggcctgtagagttgtgct

SEQ ID NO: 4619 - DNA, 60 bp, Artificial Sequence
  Probe
ttcctgcctctccctcactgcaccccaaagccaatcagacaccaagtccctttaagccgc

SEQ ID NO: 4620 - DNA, 60 bp, Artificial Sequence
  Probe
cgcccttcttcccggtcatcttctccatcaccacatacgtgggcttttgcctgcccttcg

SEQ ID NO: 4621 - DNA, 60 bp, Artificial Sequence
  Probe
aagacctggtgcctttcctgctgtcagcccttgtttcctgcagggatcttgcagctctcc

SEQ ID NO: 4622 - DNA, 60 bp, Artificial Sequence
  Probe
gtttgccatccagcacatcagtctgaacccccctcgatgcaccattgcaatgcgggcaat

SEQ ID NO: 4623 - DNA, 60 bp, Artificial Sequence
  Probe
cttcgggaagggaactcagctgagtgtggttgatttccttcccaccactgcccagcccac

SEQ ID NO: 4624 - DNA, 60 bp, Artificial Sequence
  Probe
accgcctagagtgttttggcaagatctgccggaccagccctcactccttcgccttctaca

SEQ ID NO: 4625 - DNA, 60 bp, Artificial Sequence
  Probe
acacagctggtgcgggatccttgtctttgtcctgtactttgtgcagtggctggtgggctt

SEQ ID NO: 4626 - DNA, 60 bp, Artificial Sequence
  Probe
gcaacgcctcctgcccagccggtttccatggaaacaactgctcagttccttgtgaatgcc

SEQ ID NO: 4627 - DNA, 60 bp, Artificial Sequence
  Probe
atgcatcaccgttggctccccagacactgctgggactcaaatgggtgcaagagtgaaggg

SEQ ID NO: 4628 - DNA, 60 bp, Artificial Sequence
  Probe
ccagggaatcattaacaagaggcagtgacatggcgcagaaggagggtggccggactgtgc

SEQ ID NO: 4629 - DNA, 60 bp, Artificial Sequence
  Probe
agcgctccatctcaccctggagataccgtgtggacacggatgaggaccgctatccacaga

SEQ ID NO: 4630 - DNA, 60 bp, Artificial Sequence
  Probe
ggggatggctttgatccaatggagcctgggaggtgtgcccagaaagcttgtctgtagcgg

SEQ ID NO: 4631 - DNA, 60 bp, Artificial Sequence
  Probe
gggtccagaggtacatgaagaacctggacgccaagcagaagaaggcttcccctagggcca

SEQ ID NO: 4632 - DNA, 60 bp, Artificial Sequence
  Probe
ggccttcccaccttccccacagagggctgcaagaactttcaaacctggagacatcaggcc

SEQ ID NO: 4633 - DNA, 60 bp, Artificial Sequence
  Probe
gcccagcaaaagcagggagtctgtggcatctgaaggctcaaaccagacaagcggctacca

SEQ ID NO: 4634 - DNA, 60 bp, Artificial Sequence
  Probe
aggaggatcacccacactggcaggcgggcatttccactgattcccaaacacacttgcctt

SEQ ID NO: 4635 - DNA, 60 bp, Artificial Sequence
  Probe
gcgcctcagtttctctctgtggcgccgcctacctcacagacttgtgagcactcactgacg

SEQ ID NO: 4636 - DNA, 60 bp, Artificial Sequence
  Probe
gcccatcctgggaaggaaaatgcattggggaaccctgtgcggattcttgtggctttggcc

SEQ ID NO: 4637 - DNA, 60 bp, Artificial Sequence
  Probe
gtggcccgaagcagtagttctcaactgggggtggttttgtaccctctctccccaggggac

SEQ ID NO: 4638 - DNA, 60 bp, Artificial Sequence
  Probe
gggcagagttgcaggggtctccacagctgaggcagtttggccggattatttgggttcctg

SEQ ID NO: 4639 - DNA, 60 bp, Artificial Sequence
  Probe
tcatgccttgcaggtgctgctgcttctgtcattgctgctgactgctctggcttcctccac

SEQ ID NO: 4640 - DNA, 60 bp, Artificial Sequence
  Probe
tgaccccctcatcatgcccttctctctcttcaccatcaggctccctttgtggcaggccag

SEQ ID NO: 4641 - DNA, 60 bp, Artificial Sequence
  Probe
cgccaaagtcagccaaggccatcacaacaactccctgccacgttgcaccttctcccaaga

SEQ ID NO: 4642 - DNA, 60 bp, Artificial Sequence
  Probe
gcttcagcgagtgcatgaacgaggtgacccgcttcctgtccacgtgcgagggcgttaata

SEQ ID NO: 4643 - DNA, 60 bp, Artificial Sequence
  Probe
cggtccaccgtggcctgtgccaatgctactatcatgtgctcctgactgtggcctgtagca

SEQ ID NO: 4644 - DNA, 60 bp, Artificial Sequence
  Probe
ggccgcatggcccctccaggaacattcccacataatacattccatcacagccagcccagc

SEQ ID NO: 4645 - DNA, 60 bp, Artificial Sequence
  Probe
actcggggtcgcctttggagcagagaggaggcaatggccaccatggagaacaaggtgatc

SEQ ID NO: 4646 - DNA, 60 bp, Artificial Sequence
  Probe
tggtcccccaggtagctgagggcatggcctacatggaacgcatgaactacattcaccgcg

SEQ ID NO: 4647 - DNA, 60 bp, Artificial Sequence
  Probe
tggctgtgtacaaccagctgctcaacatcttccccaaggaggtcttccggcctcgcaaca

SEQ ID NO: 4648 - DNA, 60 bp, Artificial Sequence
  Probe
aagctgctccaggaaggcccaagccagaccagaagacatgcagatcatcaccacagccct

SEQ ID NO: 4649 - DNA, 60 bp, Artificial Sequence
  Probe
ccagcctcttctggcagaggaccccacagctgctgatttcaagcaggaactcaggcggaa

SEQ ID NO: 4650 - DNA, 60 bp, Artificial Sequence
  Probe
acagtggcagtgctgagtttcatcctctccagtgcggccaagcacagtgtcgatggcgaa

SEQ ID NO: 4651 - DNA, 60 bp, Artificial Sequence
  Probe
ccaccctggagctgtgccacgacgagctcttcgccgacctcttcaacagcaatcacaagg

SEQ ID NO: 4652 - DNA, 60 bp, Artificial Sequence
  Probe
cggcgaagggcctggcacgtagttattgttacttggggtctgctcacctgttggggcaca

SEQ ID NO: 4653 - DNA, 60 bp, Artificial Sequence
  Probe
agctgcaagcaagagactggcccttgaagaaccaggctgcagaggcatccatctggcaga

SEQ ID NO: 4654 - DNA, 60 bp, Artificial Sequence
  Probe
cggcgcaaccaggagatgcagcagaagttggtggagctgtcggctgagaacgagaagctg

SEQ ID NO: 4655 - DNA, 60 bp, Artificial Sequence
  Probe
acaccctggaccttggggactatggagctcagggcgactgtgaccctgaagcaccaatga

SEQ ID NO: 4656 - DNA, 60 bp, Artificial Sequence
  Probe
atgggtccgcagacttcctctgcaaagggccagagagcacgcatttggctttctgagcca

SEQ ID NO: 4657 - DNA, 60 bp, Artificial Sequence
  Probe
gctcccaaaggcgcaccaatgaccaacatttgccccccggaggaaagaactggaaccagc

SEQ ID NO: 4658 - DNA, 60 bp, Artificial Sequence
  Probe
ggtcctcccacctcagcctccccagttgctaatattttcgcatgtgccaccgcgtccagc

SEQ ID NO: 4659 - DNA, 60 bp, Artificial Sequence
  Probe
aacgaagcgcgaggccatcctgaaggtgctggagaacctgacaccggaggagctcaagaa

SEQ ID NO: 4660 - DNA, 60 bp, Artificial Sequence
  Probe
ccctgcccccagaggccaggagctctgcccttgacctgtattccacttactccaccttcc

SEQ ID NO: 4661 - DNA, 60 bp, Artificial Sequence
  Probe
cccacaagggctactgcctggagcgcaggctgtaccgtgtttccttggcttgtgtgtgtg

SEQ ID NO: 4662 - DNA, 60 bp, Artificial Sequence
  Probe
gcggcagctggatcgctcgacggagtgcctctggtagttggccaagacgccgaatatcaa

SEQ ID NO: 4663 - DNA, 60 bp, Artificial Sequence
  Probe
accaggtggttgcattcttggcaatggtcatgggaacccacacctacagccactggccca

SEQ ID NO: 4664 - DNA, 60 bp, Artificial Sequence
  Probe
ctccgggaatttccctggcccggccgctccgggctttccagtctcaaccatgcataaaaa

SEQ ID NO: 4665 - DNA, 60 bp, Artificial Sequence
  Probe
agcctgcgcctcaagaccttcagctccaagagcgagtaccagctggtggtgaacgcagtg

SEQ ID NO: 4666 - DNA, 60 bp, Artificial Sequence
  Probe
ccgggacaccatctcgcggctggacgggcgcattatgtgctactacaatgtgctgctcct

SEQ ID NO: 4667 - DNA, 60 bp, Artificial Sequence
  Probe
tcccctagaggtgaatgacgggctgtgcaacctgctcatcgcgccctgcaccatcatgaa

SEQ ID NO: 4668 - DNA, 60 bp, Artificial Sequence
  Probe
ggtccgtcgcatcgtctgttcctacgtgggcgagaacaccctgtgcgagagccagtacct

SEQ ID NO: 4669 - DNA, 60 bp, Artificial Sequence
  Probe
tgctcctgccagttgtggtcgccttcgccagagctgaagctgaagaagatggggacctgc

SEQ ID NO: 4670 - DNA, 60 bp, Artificial Sequence
  Probe
cgtccaccgggaccttcgtgcagccaacatcctggtgggagagaacctggtgtgcaaagt

SEQ ID NO: 4671 - DNA, 60 bp, Artificial Sequence
  Probe
ccttccccccagggaaggcccctcatgcctttccttccctttctctggggattccacacc

1. A composition comprising a PathoChip v5, wherein the PathoChip v5 comprises over 60,000 probes specific for a plurality of microbes, and a plurality of probes specific for Coronaviruses.

2. The composition of claim 1, wherein the Coronavirus probes comprise at least one nucleotide sequence selected from the group consisting of SEQ ID NOs: 1-37.

3. The composition of claim 1, wherein the Coronavirus probes consist of the nucleotide sequences set forth in SEQ ID NOs: 1-37.

4. A composition comprising a PathoChip comprising a plurality of probes specific for a plurality of respiratory pathogens, a plurality of probes specific for Coronaviruses, and a plurality of probes specific for immune markers of innate and adaptive responses to infections, inflammation, immune disorders, metabolism, and toxicological responses.

5. The composition of claim 4, wherein the plurality of probes specific for immune markers of innate and adaptive responses comprise at least one nucleotide sequence selected from the group consisting of SEQ ID NOs: 38-4,671.

6. The composition of claim 4, wherein the plurality of probes specific for immune markers of innate and adaptive responses consist of the nucleotide sequences set forth in SEQ ID NOs: 38-4,671.

7. The composition of claim 4, wherein the Coronavirus probes comprise at least one nucleotide sequence selected from the group consisting of SEQ ID NOs: 1-37.

8. The composition of claim 4, wherein the Coronavirus probes consist of the nucleotide sequences set forth in SEQ ID NOs: 1-37.

9. A composition comprising a plurality of nucleic acids, wherein the nucleic acids comprise at least one nucleotide sequence selected from the group consisting of SEQ ID NOs: 1-37.

10. A composition comprising a plurality of nucleic acids, wherein the nucleic acids consist of the nucleotide sequences set forth in SEQ ID NOs: 1-37.

11. A composition comprising a plurality of nucleic acids, wherein the nucleic acids comprise at least one nucleotide sequence selected from the group consisting of SEQ ID NOs: 38-4,671.

12. A composition comprising a plurality of nucleic acids, wherein the nucleic acids consist of the nucleotide sequences set forth in SEQ ID NOs: 38-4,671.

13. The composition of claim 9, wherein the composition comprises a microarray.

14. The composition of claim 13, wherein the microarray comprises a biochip, glass slide, bead, or paper.

15. A composition comprising an Immunome ChIP, wherein the Immunome ChIP comprises a plurality of probes specific for immune markers of innate and adaptive responses to infections, inflammation, immune disorders, metabolism, and toxicological responses.

16. The composition of claim 15, wherein the plurality of probes comprise at least one nucleotide sequence selected from the group consisting of SEQ ID NOs: 38-4,671.

17. The composition of claim 12, wherein the plurality of probes consist of the nucleotide sequences set forth in SEQ ID NOs: 38-4,671.

18. A method of detecting a Coronavirus in a sample from a subject, the method comprising:
hybridizing a detectably-labeled nucleic acid from the sample to a PathoChip v5 array, wherein the PathoChip v5 comprises over 60,000 probes specific for a plurality of microbes, and a plurality of probes specific for Coronaviruses,
wherein when the nucleic acid from the sample hybridizes to at least three Coronavirus probes on the PathoChip v5, a Coronavirus is detected in the sample.

19. A method of identifying a high-risk subject, the method comprising:
hybridizing a detectably-labeled nucleic acid from a sample from the subject to a PathoChip v5 array, wherein the PathoChip v5 comprises over 60,000 probes specific for a plurality of microbes, and a plurality of probes specific for Coronaviruses,
wherein when the nucleic acid from the sample hybridizes to at least three Coronavirus probes on the PathoChip v5 and at least three probes specific for a microbe, the subject is identified as high-risk.

20. A method of detecting a Coronavirus in a sample from a subject, the method comprising:
hybridizing a detectably-labeled nucleic acid from the sample to a PathoChip array, wherein the PathoChip comprises a plurality of probes specific for a plurality of respiratory pathogens, a plurality of probes specific for Coronaviruses, and a plurality of probes specific for immune markers of innate and adaptive responses to infections, inflammation, immune disorders, metabolism, and toxicological responses,
wherein when the nucleic acid from the sample hybridizes to at least three Coronavirus probes on the PathoChip, a Coronavirus is detected in the sample.

21. A method of identifying a high-risk subject, the method comprising:
hybridizing a detectably-labeled nucleic acid from a sample from the subject to a PathoChip array, wherein the PathoChip comprises a plurality of probes specific for a plurality of respiratory pathogens, a plurality of probes specific for Coronaviruses, and a plurality of probes specific for immune markers of innate and adaptive responses to infections, inflammation, immune disorders, metabolism, and toxicological responses,
wherein when the nucleic acid from the sample hybridizes to at least three Coronavirus probes on the PathoChip and at least three probes specific for immune markers of innate and adaptive responses, the subject is identified as high-risk.

22. The method of claim 18, wherein the Coronavirus probes comprise at least one nucleotide sequence selected from the group consisting of SEQ ID NOs: 1-37.

23. The method of claim 18, wherein the Coronavirus probes consist of the nucleotide sequences set forth in SEQ ID NOs: 1-37.

24. The method of claim 18, further comprising wherein when a Coronavirus is detected in the sample from the subject or the subject is identified as high-risk, then the subject is administered a treatment for the Coronavirus.

25. The method of claim 18, wherein the plurality of probes specific for immune markers of innate and adaptive responses comprises at least one nucleotide sequence selected from the group consisting of SEQ ID NOs: 38-4,671.

26. The method of claim 18, wherein the plurality of probes specific for immune markers of innate and adaptive responses consists of the nucleotide sequences set forth in SEQ ID NOs: 38-4,671.

27. The method of claim 18, wherein the subject is human.

28. The method of claim 18, wherein the detectably-labeled nucleic acid is labeled with a fluorophore, radioactive phosphate, biotin, or enzyme.

29. The method of claim 28, wherein the fluorophore is Cy3 or Cy5.
